(19) United States
(12) Patent Application Publication
(10) Pub. No.: US 2005/0153402 A1
(43) Pub. Date: Jul. 14, 2005

(54) Corynebacterium glutamicum genes encoding regulatory proteins

(75) Inventors: Markus Pompejus, Waldsee (DE); Burkhard Kroger, Limburgerhof (DE); Hartwig Schroder, Nubloch (DE); Oskar Zelder, Speyer (DE); Gregor Haberhauer, Limburgerhof (DE)

Correspondence Address: LAHIVE & COCKFIELD, LLP., 28 STATE STREET, BOSTON, MA, 02109, US

(73) Assignee: BASF AG, Ludwigshafen (DE)

(21) Appl. No.: 11/006,098

(22) Filed: Dec. 6, 2004

Related U.S. Application Data
(63) Continuation of application No. 09/602,874, filed on Jun. 23, 2000, now abandoned.
(60) Provisional application No. 60/141,031, filed on Jun. 25, 1999.
(60) Provisional application No. 60/142,690, filed on Jul. 1, 1999.
(60) Provisional application No. 60/151,251, filed on Aug. 27, 1999.

(30) Foreign Application Priority Data
Jul. 1, 1999 (DE) 19930476.9
Jul. 8, 1999 (DE) 19931419.5
Jul. 8, 1999 (DE) 19931420.9
Jul. 9, 1999 (DE) 19932122.1
Jul. 9, 1999 (DE) 19932128.0
Jul. 9, 1999 (DE) 19932134.5
Jul. 9, 1999 (DE) 19932206.6
Jul. 9, 1999 (DE) 19932207.4
Jul. 14, 1999 (DE) 19933003.4
Aug. 31, 1999 (DE) 19941390.8
Sep. 3, 1999 (DE) 19942088.2
Sep. 3, 1999 (DE) 19942124.2

(51) Int. Cl. C12P 13/04; C12Q 1/68; C07H 21/04; C12N 9/00; C12N 1/21; C12N 15/74

(52) U.S. Cl. 435/106; 435/6; 435/69.1; 435/183; 435/320.1; 435/252.3; 536/23.2

(57) ABSTRACT

Isolated nucleic acid molecules, designated MR nucleic acid molecules, which encode novel MR proteins from Corynebacterium glutamicum are described. The invention also provides antisense nucleic acid molecules, recombinant expression vectors containing MR nucleic acid molecules, and host cells into which the expression vectors have been introduced. The invention still further provides isolated MR proteins, mutated MR proteins, fusion proteins, antigenic peptides and methods for the improvement of production of a desired compound from C. glutamicum based on genetic engineering of MR genes in this organism.

### RELATED APPLICATIONS

[0001] This application claims priority to U.S. Provisional Patent Application No. 60/141,031, filed Jun. 25, 1999, U.S. Provisional Patent Application No. 60/142,690, filed Jul. 1, 1999, and also to U.S. Provisional Patent Application No. 60/151,251, filed Aug. 27, 1999. This application also claims priority to German Patent Application No. 19930476.9, filed Jul. 1, 1999, German Patent Application No. 19931419.5, filed Jul. 8, 1999, German Patent Application No. 1993 1420.9, filed Jul. 8, 1999, German Patent Application No. 19932122.1, filed Jul. 9, 1999, German Patent Application No. 19932128.0, filed Jul. 9, 1999, German Patent Application No. 19932134.5, filed Jul. 9, 1999, German Patent Application No. 19932206.6, filed Jul. 9, 1999, German Patent Application No. 19932207.4, filed Jul. 9, 1999, German Patent Application No. 19933003.4, filed Jul. 14, 1999, German Patent Application No. 19941390.8, filed Aug. 31, 1999, German Patent Application No. 19942088.2, filed Sep. 3, 1999, and German Patent Application No. 19942124.2, filed Sep. 3, 1999. The entire contents of all of the aforementioned applications are hereby expressly incorporated herein by this reference.

### BACKGROUND OF THE INVENTION

[0002] Certain products and by-products of naturally-occurring metabolic processes in cells have utility in a wide array of industries, including the food, feed, cosmetics, and pharmaceutical industries. These molecules, collectively termed ‘fine chemicals’, include organic acids, both proteinogenic and non-proteinogenic amino acids, nucleotides and nucleosides, lipids and fatty acids, diols, carbohydrates, aromatic compounds, vitamins and cofactors, and enzymes. Their production is most conveniently performed through the large-scale culture of bacteria developed to produce and secrete large quantities of one or more desired molecules. One particularly useful organism for this purpose is Corynebacterium glutamicum, a gram positive, nonpathogenic bacterium. Through strain selection, a number of mutant strains have been developed which produce an array of desirable compounds. However, selection of strains improved for the production of a particular molecule is a time-consuming and difficult process.

### SUMMARY OF THE INVENTION

[0003] The invention provides novel bacterial nucleic acid molecules which have a variety of uses. These uses include the identification of microorganisms which can be used to produce fine chemicals, the modulation of fine chemical production in C. glutamicum or related bacteria, the typing or identification of C. glutamicum or related bacteria, as reference points for mapping the C. glutamicum genome, and as markers for transformation. These novel nucleic acid molecules encode proteins, referred to herein as metabolic regulatory (MR) proteins.

[0004] C. glutamicum is a gram positive, aerobic bacterium which is commonly used in industry for the large-scale production of a variety of fine chemicals, and also for the degradation of hydrocarbons (such as in petroleum spills) and for the oxidation of terpenoids. The MR nucleic acid molecules of the invention, therefore, can be used to identify microorganisms which can be used to produce fine chemicals, e.g., by fermentation processes. Modulation of the expression of the MR nucleic acids of the invention, or modification of the sequence of the MR nucleic acid molecules of the invention, can be used to modulate the production of one or more fine chemicals from a microorganism (e.g., to improve the yield or production of one or more fine chemicals from a Corynebacterium or Brevibacterium species).

[0005] The MR nucleic acids of the invention may also be used to identify an organism as being Corynebacterium glutamicum or a close relative thereof, or to identify the presence of C. glutamicum or a relative thereof in a mixed population of microorganisms. The invention provides the nucleic acid sequences of a number of C. glutamicum genes; by probing the extracted genomic DNA of a culture of a unique or mixed population of microorganisms under stringent conditions with a probe spanning a region of a C. glutamicum gene which is unique to this organism, one can ascertain whether this organism is present. Although Corynebacterium glutamicum itself is nonpathogenic, it is related to species pathogenic in humans, such as Corynebacterium diphtheriae (the causative agent of diphtheria); the detection of such organisms is of significant clinical relevance.

[0006] The MR nucleic acid molecules of the invention may also serve as reference points for mapping of the C. glutamicum genome, or of genomes of related organisms. Similarly, these molecules, or variants or portions thereof, may serve as markers for genetically engineered Corynebacterium or Brevibacterium species. e.g. The MR proteins encoded by the novel nucleic acid molecules of the invention are capable of, for example, performing a function involved in the transcriptional, translational, or posttranslational regulation of proteins important for the normal metabolic functioning of cells. Given the availability of cloning vectors for use in Corynebacterium glutamicum, such as those disclosed in Sinskey et al., U.S. Pat. No. 4,649,119, and techniques for genetic manipulation of C. glutamicum and the related Brevibacterium species (e.g., lactofermentum) (Yoshihama et al, J. Bacteriol. 162: 591-597 (1985); Katsumata et al., J. Bacteriol. 159: 306-311 (1984); and Santamaria et al., J. Gen. Microbiol. 130: 2237-2246 (1984)), the nucleic acid molecules of the invention may be utilized in the genetic engineering of this organism to make it a better or more efficient producer of one or more fine chemicals.

[0007] This improved yield, production and/or efficiency of production of a fine chemical may be due to a direct effect of manipulation of a gene of the invention, or it may be due to an indirect effect of such manipulation. Specifically, alterations in C. glutamicum MR proteins which normally regulate the yield, production and/or efficiency of production of a fine chemical metabolic pathways may have a direct impact on the overall production or rate of production of one or more of these desired compounds from this organism. Alterations in the proteins involved in these metabolic pathways may also have an indirect impact on the yield, production and/or efficiency of production of a desired fine chemical. Regulation of metabolism is necessarily complex, and the regulatory mechanisms governing different pathways may intersect at multiple points such that more than one pathway can be rapidly adjusted in accordance with a particular cellular event. This enables the modification of a regulatory protein for one pathway to have an impact on the regulation of many other pathways as well, some of which may be involved in the biosynthesis or degradation of a desired fine chemical. In this indirect fashion, the modulation of action of an MR protein may have an impact on the production of a fine chemical produced by a pathway different from one which that MR protein directly regulates.

[0008] The nucleic acid and protein molecules of the invention may be utilized to directly improve the yield, production, and/or efficiency of production of one or more desired fine chemicals from Corynebacterium glutamicum. Using recombinant genetic techniques well known in the art, one or more of the regulatory proteins of the invention may be manipulated such that its function is modulated. For example, the mutation of an MR protein involved in the repression of transcription of a gene encoding an enzyme which is required for the biosynthesis of an amino acid such that it no longer is able to repress transcription may result in an increase in production of that amino acid. Similarly, the alteration of activity of an MR protein resulting in increased translation or activating posttranslational modification of a C. glutamicum protein involved in the biosynthesis of a desired fine chemical may in turn increase the production of that chemical. The opposite situation may also be of benefit: by increasing the repression of transcription or translation, or by posttranslational negative modification of a C. glutamicum protein involved in the regulation of a degradative pathway for a compound, one may increase the production of this chemical. In each case, the overall yield or rate of production of the desired fine chemical may be increased.

[0009] It is also possible that such alterations in the protein and nucleotide molecules of the invention may improve the yield, production, and/or efficiency of production of fine chemicals through indirect mechanisms. The metabolism of any one compound is necessarily intertwined with other biosynthetic and degradative pathways within the cell, and necessary cofactors, intermediates, or substrates in one pathway are likely supplied or limited by another such pathway. Therefore, by modulating the activity of one or more of the regulatory proteins of the invention, the production or efficiency of activity of another fine chemical biosynthetic or degradative pathway may be impacted. Further, the manipulation of one or more regulatory proteins may increase the overall ability of the cell to grow and multiply in culture, particularly in large-scale fermentative culture, where growth conditions may be suboptimal. For example, by mutating an MR protein of the invention which would normally cause a repression in the biosynthesis of nucleotides in response to suboptimal extracellular supplies of nutrients (thereby preventing cell division) such that it is decreased in repressor ability, one may increase the biosynthesis of nucleotides and perhaps increase cell division. Changes in MR proteins which result in increased cell growth and division in culture may result in an increase in yield, production, and/or efficiency of production of one or more desired fine chemicals from the culture, due at least to the increased number of cells producing the chemical in the culture.

[0010] The invention provides novel nucleic acid molecules which encode proteins, referred to herein as metabolic pathway proteins (MR), which are capable of, for example, performing an enzymatic step involved in the transcriptional, translational, or posttranslational regulation of metabolic pathways in C. glutamicum. Nucleic acid molecules encoding an MR protein are referred to herein as MR nucleic acid molecules. In a preferred embodiment, the MR protein participates in the transcriptional, translational, or posttranslational regulation of one or more metabolic pathways. Examples of such proteins include those encoded by the genes set forth in Table 1.

[0011] Accordingly, one aspect of the invention pertains to isolated nucleic acid molecules (e.g., cDNAs, DNAs, or RNAs) comprising a nucleotide sequence encoding an MR protein or biologically active portions thereof, as well as nucleic acid fragments suitable as primers or hybridization probes for the detection or amplification of MR-encoding nucleic acid (e.g., DNA or mRNA). In particularly preferred embodiments, the isolated nucleic acid molecule comprises one of the nucleotide sequences set forth in Appendix A or the coding region or a complement thereof of one of these nucleotide sequences. In other particularly preferred embodiments, the isolated nucleic acid molecule of the invention comprises a nucleotide sequence which hybridizes to or is at least about 50%, preferably at least about 60%, more preferably at least about 70%, 80% or 90%, and even more preferably at least about 95%, 96%, 97%, 98%, 99% or more homologous to a nucleotide sequence set forth in Appendix A, or a portion thereof. In other preferred embodiments, the isolated nucleic acid molecule encodes one of the amino acid sequences set forth in Appendix B. The preferred MR proteins of the present invention also preferably possess at least one of the MR activities described herein.

[0012] In another embodiment, the isolated nucleic acid molecule encodes a protein or portion thereof wherein the protein or portion thereof includes an amino acid sequence which is sufficiently homologous to an amino acid sequence of Appendix B, e.g., sufficiently homologous to an amino acid sequence of Appendix B such that the protein or portion thereof maintains an MR activity. Preferably, the protein or portion thereof encoded by the nucleic acid molecule maintains the ability to transcriptionally, translationally, or posttranslationally regulate a metabolic pathway in C. glutamicum. In one embodiment, the protein encoded by the nucleic acid molecule is at least about 50%, preferably at least about 60%, and more preferably at least about 70%, 80%, or 90% and most preferably at least about 95%, 96%, 97%, 98%, or 99% or more homologous to an amino acid sequence of Appendix B (e.g., an entire amino acid sequence selected from those sequences set forth in Appendix B). In another preferred embodiment, the protein is a full length C. glutamicum protein which is substantially homologous to an entire amino acid sequence of Appendix B (encoded by an open reading frame showvn in Appendix A).

[0013] In another preferred embodiment, the isolated nucleic acid molecule is derived from C. glutamicum and encodes a protein (e.g., an MR fusion protein) which includes a biologically active domain which is at least about 50% or more homologous to one of the amino acid sequences of Appendix B and is able to transcriptionally, translationally, or posttranslationally regulate a metabolic pathway in C. glutamicum, or has one or more of the activities set forth in Table 1, and which also includes heterologous nucleic acid sequences encoding a heterologous polypeptide or regulatory regions.

[0014] In another embodiment, the isolated nucleic acid molecule is at least 15 nucleotides in length and hybridizes under stringent conditions to a nucleic acid molecule comprising a nucleotide sequence of Appendix A. Preferably, the isolated nucleic acid molecule corresponds to a naturally-occurring nucleic acid molecule. More preferably, the isolated nucleic acid encodes a naturally-occurring C. glutamicum MR protein, or a biologically active portion thereof.

[0015] Another aspect of the invention pertains to vectors, e.g., recombinant expression vectors, containing the nucleic acid molecules of the invention, and host cells into which such vectors have been introduced. In one embodiment, such a host cell is used to produce an MR protein by culturing the host cell in a suitable medium. The MR protein can be then isolated from the medium or the host cell.

[0016] Yet another aspect of the invention pertains to a genetically altered microorganism in which an MR gene has been introduced or altered. In one embodiment, the genome of the microorganism has been altered by introduction of a nucleic acid molecule of the invention encoding wild-type or mutated MR sequence as a transgene. In another embodiment, an endogenous MR gene within the genome of the microorganism has been altered, e.g., functionally disrupted, by homologous recombination with an altered MR gene. In another embodiment, an endogenous or introduced MR gene in a microorganism has been altered by one or more point mutations, deletions, or inversions, but still encodes a functional MR protein. In still another embodiment, one or more of the regulatory regions (e.g., a promoter, repressor, or inducer) of an MR gene in a microorganism has been altered (e.g., by deletion, truncation, inversion, or point mutation) such that the expression of the MR gene is modulated. In a preferred embodiment, the microorganism belongs to the genus Corynebacterium or Brevibacterium, with Corynebacterium glutamicum being particularly preferred. In a preferred embodiment, the microorganism is also utilized for the production of a desired compound, such as an amino acid, with lysine being particularly preferred.

[0017] In another aspect, the invention provides a method of identifying the presence or activity of Corynebacterium diphtheriae in a subject. This method includes detection of one or more of the nucleic acid or amino acid sequences of the invention (e.g., the sequences set forth in Appendix A or Appendix B) in a subject, thereby detecting the presence or activity of Corynebacterium diphtheriae in the subject. Still another aspect of the invention pertains to an isolated MR protein or a portion, e.g., a biologically active portion, thereof. In a preferred embodiment, the isolated MR protein or portion thereof transcriptionally, translationally, or posttranslationally regulates one or more metabolic pathways in C. glutamicum . In another preferred embodiment, the isolated MR protein or portion thereof is sufficiently homologous to an amino acid sequence of Appendix B such that the protein or portion thereof maintains the ability to transcriptionally, translationally, or posttranslationally regulate one or more metabolic pathways in C. glutamicum.

[0018] The invention also provides an isolated preparation of an MR protein. In preferred embodiments, the MR protein comprises an amino acid sequence of Appendix B. In another preferred embodiment, the invention pertains to an isolated full length protein which is substantially homologous to an entire amino acid sequence of Appendix B (encoded by an open reading frame set forth in Appendix A). In yet another embodiment, the protein is at least about 50%, preferably at least about 60%, and more preferably at least about 70%, 80%, or 90%, and most preferably at least about 95%, 96%, 97%, 98%, or 99% or more homologous to an entire amino acid sequence of Appendix B. In other embodiments, the isolated MR protein comprises an amino acid sequence which is at least about 50% or more homologous to one of the amino acid sequences of Appendix B and is able to transcriptionally, translatiolnally, or posttranslationally regulate one or more metabolic pathways in C. glutamicum, or has one or more of the activities set forth in Table 1.

[0019] Alternatively, the isolated MR protein can comprise an amino acid sequence which is encoded by a nucleotide sequence which hybridizes, e.g., hybridizes under stringent conditions, or is at least about 50%, preferably at least about 60%, more preferably at least about 70%, 80%, or 90%, and even more preferably at least about 95%, 96%, 97%, 98,%, or 99% or more homologous, to a nucleotide sequence of Appendix B. It is also preferred that the preferred forms of MR proteins also have one or more of the MR bioactivities described herein.

[0020] The MR polypeptide, or a biologically active portion thereof, can be operatively linked to a non-MR polypeptide to form a fusion protein. In preferred embodiments, this fusion protein has an activity which differs from that of the MR protein alone. In other preferred embodiments, this fusion protein transcriptionally, translationally, or posttranslationally regulates one or more metabolic pathways in C. glutamicum. In particularly preferred embodiments, integration of this fusion protein into a host cell modulates production of a desired compound from the cell.

[0021] In another aspect, the invention provides methods for screening molecules which modulate the activity of an MR protein, either by interacting with the protein itself or a substrate or binding partner of the MR protein, or by modulating the transcription or translation of an MR nucleic acid molecule of the invention. Another aspect of the invention pertains to a method for producing a fine chemical. This method involves the culturing of a cell containing a vector directing the expression of an MR nucleic acid molecule of the invention, such that a fine chemical is produced. In a preferred embodiment, this method further includes the step of obtaining a cell containing such a vector, in which a cell is transfected with a vector directing the expression of an MR nucleic acid. In another preferred embodiment, this method further includes the step of recovering the fine chemical from the culture. In a particularly preferred embodiment, the cell is from the genus Corynebacterium or Brevibacterium, or is selected from those strains set forth in Table 3.

[0022] Another aspect of the invention pertains to methods for modulating production of a molecule from a microorganism. Such methods include contacting the cell with an agent which modulates MR protein activity or MR nucleic acid expression such that a cell associated activity is altered relative to this same activity in the absence of the agent. In a preferred embodiment, the cell is modulated for one or more C. glutamicum metabolic pathway regulatory systems, such that the yields or rate of production of a desired fine chemical by this microorganism is improved. The agent which modulates MR protein activity can be an agent which stimulates MR protein activity or MR nucleic acid expression. Examples of agents which stimulate MR protein activity or MR nucleic acid expression include small molecules, active MR proteins, and nucleic acids encoding MR proteins that have been introduced into the cell. Examples of agents which inhibit MR activity or expression include small molecules and antisense MR nucleic acid molecules.

[0023] Another aspect of the invention pertains to methods for modulating yields of a desired compound from a cell, involving the introduction of a wild-type or mutant MR gene into a cell, either maintained on a separate plasmid or integrated into the genome of the host cell. If integrated into the genome, such integration can be random, or it can take place by homologous recombination such that the native gene is replaced by the introduced copy, causing the production of the desired compound from the cell to be modulated. In a preferred embodiment, said yields are increased. In another preferred embodiment, said chemical is a fine chemical. In a particularly preferred embodiment, said fine chemical is an amino acid. In especially preferred embodiments, said amino acid is L-lysine.

### DETAILED DESCRIPTION OF THE INVENTION

[0024] The present invention provides MR nucleic acid and protein molecules which are involved in the regulation of metabolism in Corynebacterium glutamicum, including regulation of fine chemical metabolism. The molecules of the invention may be utilized in the modulation of production of fine chemicals from microorganisms, such as C. glutamicum, either directly (e.g., where modulation of the activity of a lysine biosynthesis regulatory protein has a direct impact on the yield, production, and/or efficiency of production of lysine from that organism), or may have an indirect impact which nonetheless results in an increase in yield, production, and/or efficiency of production of the desired compound (e.g., where modulation of the regulation of a nucleotide biosynthesis protein has an impact on the production of an organic acid or a fatty acid from the bacterium, perhaps due to concomitant regulatory alterations in the biosynthetic or degradation pathways for these chemicals in response to the altered regulation of nucleotide biosynthesis). Aspects of the invention are further explicated below.

I. Fine Chemicals

[0025] The term ‘fine chemical’ is art-recognized and includes molecules produced by an organism which have applications in various industries, such as, but not limited to, the pharmaceutical, agriculture, and cosmetics industries. Such compounds include organic acids, such as tartaric acid, itaconic acid, and diaminopimelic acid, both proteinogenic and non-proteinogenic amino acids, purine and pyrimidine bases, nucleosides, and nucleotides (as described e.g. in Kuninaka, A. (1996) Nucleotides and related compounds, p. 561-612, in Biotechnology vol. 6, Rehm et al., eds. VCH: Weinheim, and references contained therein), lipids, both saturated and unsaturated fatty acids (e.g., arachidonic acid), diols (e.g., propane diol, and butane diol), carbohydrates (e.g., hyaluronic acid and trehalose), aromatic compounds (e.g., aromatic amines, vanillin, and indigo), vitamins and cofactors (as described in Ullmann's Encyclopedia of Industrial Chemistry, vol. A27, “Vitamins”, p. 443-613 (1996) VCH: Weinheim and references therein; and Ong, A. S., Niki, E. & Packer, L. (1995) “Nutrition, Lipids, Health, and Disease” Proceedings of the UNESCO/Confederation of Scientific and Technological Associations in Malaysia, and the Society for Free Radical Research—Asia, held Sep. 1-3, 1994 at Penang, Malaysia, AOCS Press, (1995)), enzymes, polyketides (Cane et al. (1998) Science 282: 63-68), and all other chemicals described in Gutcho (1983) Chemicals by Fermentation, Noyes Data Corporation, ISBN: 0818805086 and references therein. The metabolism and uses of certain of these fine chemicals are further explicated below.

A. Amino Acid Metabolism and Uses

[0026] Amino acids comprise the basic structural units of all proteins, and as such are essential for normal cellular functioning in all organisms. The term “amino acid” is art-recognized. The proteinogenic amino acids, of which there are 20 species, serve as structural units for proteins, in which they are linked by peptide bonds, while the nonproteinogenic amino acids (hundreds of which are known) are not normally found in proteins (see Ulmann's Encyclopedia of Industrial Chemistry, vol. A2, p. 57-97 VCH: Weinheim (1985)). Amino acids may be in the D- or L- optical configuration, though L-amino acids are generally the only type found in naturally-occurring proteins. Biosynthetic and degradative pathways of each of the 20 proteinogenic amino acids have been well characterized in both prokaryotic and eukaryotic cells (see, for example, Stryer, L. Biochemistry, 3^{rd} edition, pages 578-590 (1988)). The ‘essential’ amino acids (histidine, isoleucine, leucine, lysine, methionine, phenylalanine, threonine, tryptophan, and valine), so named because they are generally a nutritional requirement due to the complexity of their biosyntheses, are readily converted by simple biosynthetic pathways to the remaining 11 ‘nonessential’ amino acids (alanine, arginine, asparagine, aspartate, cysteine, glutamate, glutamine, glycine, proline, serine, and tyrosine). Higher animals do retain the ability to synthesize some of these amino acids, but the essential amino acids must be supplied from the diet in order for normal protein synthesis to occur.

[0027] Aside from their function in protein biosynthesis, these amino acids are interesting chemicals in their own right, and many have been found to have various applications in the food, feed, chemical, cosmetics, agriculture, and pharmaceutical industries. Lysine is an important amino acid in the nutrition not only of humans, but also of monogastric animals such as poultry and swine. Glutamate is most commonly used as a flavor additive (mono-sodium glutamate, MSG) and is widely used throughout the food industry, as are aspartate, phenylalanine, glycine, and cysteine. Glycine, L-methionine and tryptophan are all utilized in the pharmaceutical industry. Glutamine, valine, leucine, isoleucine, histidine, arginine, proline, serine and alanine are of use in both the pharmaceutical and cosmetics industries. Threonine, tryptophan, and D/L-methionine are common feed additives. (Leuchtenberger, W. (1996) Amino aids—technical production and use, p. 466-502 in Rehm et al. (eds.) Biotechnology vol. 6, chapter 14a, VCH: Weinheim). Additionally, these amino acids have been found to be useful as precursors for the synthesis of synthetic amino acids and proteins, such as N-acetylcysteine, S-carboxymethyl-L-cysteine, (S)-5-hydroxytryptophan, and others described in Ulmann's Encyclopedia of Industrial Chemistry, vol. A2, p. 57-97, VCH: Weinheim, 1985.

[0028] The biosynthesis of these natural amino acids in organisms capable of producing them, such as bacteria, has been well characterized (for review of bacterial amino acid biosynthesis and regulation thereof, see Umbarger, H. E.(1978) Ann. Rev. Biochem. 47: 533-606). Glutamate is synthesized by the reductive amination of α-ketoglutarate, an intermediate in the citric acid cycle. Glutamine, proline, and arginine are each subsequently produced from glutamate. The biosynthesis of serine is a three-step process beginning with 3-phosphoglycerate (an intermediate in glycolysis), and resulting in this amino acid after oxidation, transamination, and hydrolysis steps. Both cysteine and glycine are produced from serine; the former by the condensation of homocysteine with serine, and the latter by the transferal of the side-chain β-carbon atom to tetrahydrofolate, in a reaction catalyzed by serine transhydroxymethylase. Phenylalanine, and tyrosine are synthesized from the glycolytic and pentose phosphate pathway precursors erythrose 4-phosphate and phosphoenolpyruvate in a 9-step biosynthetic pathway that differ only at the final two steps after synthesis of prephenate. Tryptophan is also produced from these two initial molecules, but its synthesis is an 11-step pathway. Tyrosine may also be synthesized from phenylalanine, in a reaction catalyzed by phenylalanine hydroxylase. Alanine, valine, and leucine are all biosynthetic products of pyruvate, the final product of glycolysis. Aspartate is formed from oxaloacetate, an intermediate of the citric acid cycle. Asparagine, methionine, threonine, and lysine are each produced by the conversion of aspartate. Isoleucine is formed from threonine. A complex 9-step pathway results in the production of histidine from 5-phosphoribosyl-1-pyrophosphate, an activated sugar.

[0029] Amino acids in excess of the protein synthesis needs of the cell cannot be stored, and are instead degraded to provide intermediates for the major metabolic pathways of the cell (for review see Stryer, L. Biochemistry 3^{rd} ed. Ch. 21 “Amino Acid Degradation and the Urea Cycle” p. 495-516 (1988)). Although the cell is able to convert unwanted amino acids into useful metabolic intermediates, amino acid production is costly in terms of energy, precursor molecules, and the enzymes necessary to synthesize them. Thus it is not surprising that amino acid biosynthesis is regulated by feedback inhibition, in which the presence of a particular amino acid serves to slow or entirely stop its own production (for overview of feedback mechanisms in amino acid biosynthetic pathways, see Stryer, L. Biochemistry, 3^{rd} ed. Ch. 24: “Biosynthesis of Amino Acids and Heme” p. 575-600 (1988)). Thus, the output of any particular amino acid is limited by the amount of that amino acid present in the cell.

B. Vitamin, Cofactor, and Nutraceutical Metabolism and Uses

[0030] Vitamins, cofactors, and nutraceuticals comprise another group of molecules which the higher animals have lost the ability to synthesize and so must ingest, although they are readily synthesized by other organisms such as bacteria. These molecules are either bioactive substances themselves, or are precursors of biologically active substances which may serve as electron carriers or intermediates in a variety of metabolic pathways. Aside from their nutritive value, these compounds also have significant industrial value as coloring agents, antioxidants, and catalysts or other processing aids. (For an overview of the structure, activity, and industrial applications of these compounds, see, for example, Ullman's Encyclopedia of Industrial Chemistry, “Vitamins” vol. A27, p. 443-613, VCH: Weinheim, 1996.) The term “vitamin” is art-recognized, and includes nutrients which are required by an organism for normal functioning, but which that organism cannot synthesize by itself The group of vitamins may encompass cofactors and nutraceutical compounds. The language “cofactor” includes nonproteinaceous compounds required for a normal enzymatic activity to occur. Such compounds may be organic or inorganic; the cofactor molecules of the invention are preferably organic. The term “nutraceutical” includes dietary supplements having health benefits in plants and animals, particularly humans. Examples of such molecules are vitamins, antioxidants, and also certain lipids (e.g., polyunsaturated fatty acids).

[0031] The biosynthesis of these molecules in organisms capable of producing them, such as bacteria, has been largely characterized (Ullman's Encyclopedia of Industrial Chemistry, “Vitamins” vol. A27, p. 443-613, VCH: Weinheim, 1996; Michal, G. (1999) Biochemical Pathways: An Atlas of Biochemistry and Molecular Biology, John Wiley & Sons; Ong, A. S., Niki, E. & Packer, L. (1995) “Nutrition, Lipids, Health, and Disease” Proceedings of the UNESCO/Confederation of Scientific and Technological Associations in Malaysia, and the Society for Free Radical Research—Asia, held Sept. 1-3, 1994 at Penang, Malaysia, AOCS Press: Champaign, Ill. X, 374 S).

[0032] Thiamin (vitamin B₁) is produced by the chemical coupling of pyrimidine and thiazole moieties. Riboflavin (vitamin B₂) is synthesized from guanosine-5′-triphosphate (GTP) and ribose-5′-phosphate. Riboflavin, in turn, is utilized for the synthesis of flavin mononucleotide (FMN) and flavin adenine dinucleotide (FAD). The family of compounds collectively termed ‘vitamin B₆’ (e.g., pyridoxine, pyridoxamine, pyridoxa-5′-phosphate, and the commercially used pyridoxin hydrochloride) are all derivatives of the common structural unit, 5-hydroxy-6-methylpyridine. Pantothenate (pantothenic acid, (R)-(+)-N-(2,4-dihydroxy-3,3-dimethyl-1-oxobutyl)-β-alanine) can be produced either by chemical synthesis or by fermentation. The final steps in pantothenate biosynthesis consist of the ATP-driven condensation of β-alanine and pantoic acid. The enzymes responsible for the biosynthesis steps for the conversion to pantoic acid, to β-alanine and for the condensation to panthotenic acid are known. The metabolically active form of pantothenate is Coenzyme A, for which the biosynthesis proceeds in 5 enzymatic steps. Pantothenate, pyridoxal-5′-phosphate, cysteine and ATP are the precursors of Coenzyme A. These enzymes not only catalyze the formation of panthothante, but also the production of (R)-pantoic acid, (R)-pantolacton, (R)-panthenol (provitamin B₅), pantetheine (and its derivatives) and coenzyme A.

[0033] Biotin biosynthesis from the precursor molecule pimeloyl-CoA in microorganisms has been studied in detail and several of the genes involved have been identified. Many of the corresponding proteins have been found to also be involved in Fe-cluster synthesis and are members of the nifS class of proteins. Lipoic acid is derived from octanoic acid, and serves as a coenzyme in energy metabolism, where it becomes part of the pyruvate dehydrogenase complex and the α-ketoglutarate dehydrogenase complex. The folates are a group of substances which are all derivatives of folic acid, which is turn is derived from L-glutamic acid, p-amino-benzoic acid and 6-methylpterin. The biosynthesis of folic acid and its derivatives, starting from the metabolism intermediates guanosine-5′-triphosphate (GTP), L-glutamic acid and p-amino-benzoic acid has been studied in detail in certain microorganisms.

[0034] Corrinoids (such as the cobalamines and particularly vitamin B₁₂) and porphyrines belong to a group of chemicals characterized by a tetrapyrole ring system. The biosynthesis of vitamin B₁₂ is sufficiently complex that it has not yet been completely characterized, but many of the enzymes and substrates involved are now known. Nicotinic acid (nicotinate), and nicotinamide are pyridine derivatives which are also termed ‘niacin’. Niacin is the precursor of the important coenzymes NAD (nicotinamide adenine dinucleotide) and NADP (nicotinamide adenine dinucleotide phosphate) and their reduced forms.

[0035] The large-scale production of these compounds has largely relied on cell-free chemical syntheses, though some of these chemicals have also been produced by large-scale culture of microorganisms, such as riboflavin, Vitamin B₆, pantothenate, and biotin. Only Vitamin B₁₂ is produced solely by fermentation, due to the complexity of its synthesis. In vitro methodologies require significant inputs of materials and time, often at great cost.

C. Purine, Pyrimidine, Nucleoside and Nucleotide Metabolism and Uses

[0036] Purine and pyrimidine metabolism genes and their corresponding proteins are important targets for the therapy of tumor diseases and viral infections. The language “purine” or “pyrimidine” includes the nitrogenous bases which are constituents of nucleic acids, co-enzymes, and nucleotides. The term “nucleotide” includes the basic structural units of nucleic acid molecules, which are comprised of a nitrogenous base, a pentose sugar (in the case of RNA, the sugar is ribose; in the case of DNA, the sugar is D-deoxyribose), and phosphoric acid. The language “nucleoside” includes molecules which serve as precursors to nucleotides, but which are lacking the phosphoric acid moiety that nucleotides possess. By inhibiting the biosynthesis of these molecules, or their mobilization to form nucleic acid molecules, it is possible to inhibit RNA and DNA synthesis; by inhibiting this activity in a fashion targeted to cancerous cells, the ability of tumor cells to divide and replicate may be inhibited. Additionally, there are nucleotides which do not form nucleic acid molecules, but rather serve as energy stores (i.e., AMP) or as coenzymes (i.e., FAD and NAD).

[0037] Several publications have described the use of these chemicals for these medical indications, by influencing purine and/or pyrimidine metabolism (e.g. Christopherson, R. I. and Lyons, S. D. (1990) “Potent inhibitors of de novo pyrimidine and purine biosynthesis as chemotherapeutic agents.” Med. Res. Reviews 10: 505-548). Studies of enzymes involved in purine and pyrimidine metabolism have been focused on the development of new drugs which can be used, for example, as immunosuppressants or anti-proliferants (Smith, J. L., (1995) “Enzymes in nucleotide synthesis.” Curr. Opin. Struct. Biol. 5: 752-757; (1995) Biochem Soc. Transact. 23: 877-902). However, purine and pyrimidine bases, nucleosides and nucleotides have other utilities: as intermediates in the biosynthesis of several fine chemicals (e.g., thiamine, S-adenosyl-methionine, folates, or riboflavin), as energy carriers for the cell (e.g., ATP or GTP), and for chemicals themselves, commonly used as flavor enhancers (e.g., IMP or GMP) or for several medicinal applications (see, for example, Kuninaka, A. (1996) Nucleotides and Related Compounds in Biotechnology vol. 6, Rehm et al., eds. VCH: Weinheim, p. 561-612). Also, enzymes involved in purine, pyrimidine, nucleoside, or nucleotide metabolism are increasingly serving as targets against which chemicals for crop protection, including fungicides, herbicides and insecticides, are developed.

[0038] The metabolism of these compounds in bacteria has been characterized (for reviews see, for example, Zalkin, H. and Dixon, J. E. (1992) “de novo purine nucleotide biosynthesis”, in: Progress in Nucleic Acid Research and Molecular Biology, vol. 42, Academic Press:, p. 259-287; and Michal, G. (1999) “Nucleotides and Nucleosides”, Chapter 8 in: Biochemical Pathways: An Atlas of Biochemistry and Molecular Biology, Wiley: New York). Purine metabolism has been the subject of intensive research, and is essential to the normal functioning of the cell. Impaired purine metabolism in higher animals can cause severe disease, such as gout. Purine nucleotides are synthesized from ribose-5-phosphate, in a series of steps through the intermediate compound inosine-5′-phosphate (IMP), resulting in the production of guanosine-5′-monophosphate (GMP) or adenosine-5′-monophosphate (AMP), from which the triphosphate forms utilized as nucleotides are readily formed. These compounds are also utilized as energy stores, so their degradation provides energy for many different biochemical processes in the cell. Pyrimidine biosynthesis proceeds by the formation of uridine-5′-monophosphate (UMP) from ribose-5-phosphate. UMP, in turn, is converted to cytidine-5′-triphosphate (CTP). The deoxy-forms of all of these nucleotides are produced in a one step reduction reaction from the diphosphate ribose form of the nucleotide to the diphosphate deoxyribose form of the nucleotide. Upon phosphorylation, these molecules are able to participate in DNA synthesis.

D. Trehalose Metabolism and Uses

[0039] Trehalose consists of two glucose molecules, bound in α,α-1,1 linkage. It is commonly used in the food industry as a sweetener, an additive for dried or frozen foods, and in beverages. However, it also has applications in the pharmaceutical, cosmetics and biotechnology industries (see, for example, Nishimoto el al., (1998) U.S. Pat. No. 5,759,610; Singer, M. A. and Lindquist, S. (1998) Trends Biotech. 16: 460-467; Paiva, C. L. A. and Panek, A. D. (1996) Biotech. Ann. Rev. 2: 293-314; and Shiosaka, M. (1997) J. Japan 172: 97-102). Trehalose is produced by enzymes from many microorganisms and is naturally released into the surrounding medium, from which it can be collected using methods known in the art.

II. Mechanisms of Metabolic Regulation

[0040] All living cells have complex catabolic and anabolic metabolic capabilities with many interconnected pathways. In order to maintain a balance between the various parts of this extremely complex metabolic network, the cell employs a finely-tuned regulatory network. By regulating enzyme synthesis and enzyme activity, either independently or simultaneously, the cell is able to control the activity of disparate metabolic pathways to reflect the changing needs of the cell.

[0041] The induction or repression of enzyme synthesis may occur at either the level of transcription or translation, or both. Gene expression in prokaryotes is regulated by several mechanisms at the level of transcription (for review see e.g., Lewin, B (1990) Genes IV, Part 3: “Controlling prokaryotic genes by transcription”, Oxford University Press: Oxford, p. 213-301, and references therein, and Michal, G. (1999) Biochemical Pathways: An Atlas of Biochemistry and Molecular Biology, John Wiley & Sons). All such known regulatory processes are mediated by additional genes, which themselves respond to external influences of various kinds (e.g., temperature, nutrient availability, or light). Exemplary protein factors which have been implicated in this type of regulation include the transcription factors. These are proteins which bind to DNA, thereby either increasing the expression of a gene (positive regulation, as in the case of e.g. the ara operon from E. coli) or decreasing gene expression (negative regulation, as in the case of the lac operon from E. coli). These expression-modulating transcription factors can themselves be the subject of regulation. Their activity can, for example, be regulated by the binding of low molecular weight compounds to the DNA-binding protein, thereby stimulating (as in the case of arabinose for the ara operon) or inhibiting (as in the case of the lactose for the lac operon) the binding of these proteins to the appropriate binding site on the DNA (see, for example, Helmann, J. D. and Chamberlin, M. J. (1988) “Structure and function of bacterial sigma factors.” Ann. Rev. Biochem. 57: 839-872; Adhya, S. (1995) “The lac and gal operons today” and Boos, W. et al., “The maltose system.”, both in: Regulation of Gene Expression in Escherichia coli (Lin, E. C. C. and Lynch, A. S., eds.) Chapman & Hall: New York, p. 181-200 and 201-229; and Moran, C. P. (1993) “RNA polymerase and transcription factors.” in: Bacillus subtilis and other gram-positive bacteria, Sonenshein, A. L. et al., eds. ASM: Washington, D.C., p. 653-667.)

[0042] Aside from the transcriptional level, protein synthesis is also often regulated at the level of translation. There are multiple mechanisms by which such regulation may occur, including alteration of the ability of the ribosome to bind to one or more mRNAs, binding of the ribosome to the mRNA, the maintenance or removal of mRNA secondary structure, the utilization of common or less common codons for a particular gene, the degree of abundance of one or more tRNAs, and special regulation mechanisms, such as attenuation (see Vellanoweth, R. I. (1993) Translation and its regulation in Bacillus subtilis and other gram-positive bacteria, Sonenshein, A. L. et al., eds. ASM: Washington, D.C., p. 699-711 and references cited therein).

[0043] Transcriptional and translational regulation may be targeted to a single protein (sequential regulation) or simultaneously to several proteins in different metabolic pathways (coordinate regulation). Often, genes whose expression is coordinately regulated are physically located near one another in the genome, in an operon or regulon. Such up- or down-regulation of gene transcription and translation is governed by the cellular and extracellular levels of various factors, such as substrates (precursor and intermediate molecules used in one or more metabolic pathways), catabolites (molecules produced by biochemical pathways concerned with the production of energy from the breakdown of complex organic molecules such as sugars), and end products (the molecules resulting at the end of a metabolic pathway). Typically, the expression of genes encoding enzymes necessary for the activity of a particular pathway is induced by high levels of substrate molecules for that pathway. Similarly, such gene expression tends to be repressed when there exist high intracellular levels of the end product of the pathway (Snyder, L. and Champness, W. (1997) The Molecular Biology of Bacteria ASM: Washington). Gene expression may also be regulated by other external and internal factors, such as environmental conditions (e.g., heat, oxidative stress, or starvation). These global environmental changes cause alterations in the expression of specialized modulating genes, which directly or indirectly (via additional genes or proteins) trigger the expression of genes by means of binding to DNA and thereby inducing or repressing transcription (see, for example, Lin, E. C. C. and Lynch, A. S., eds. (1995) Regulation of Gene Expression in Escherichia coli. Chapman & Hall: New York).

[0044] Yet another mechanism by which cellular metabolism may be regulated is at the level of the protein. Such regulation is accomplished either by the activities of other proteins, or by binding of low-molecular-weight components which either impede or enable the normal functioning of the protein. Examples of protein regulation by the binding of low-molecular-weight compounds include the binding of GTP or NAD. The binding of a low-molecular-weight chemical is typically reversible, as is the case with the GTP-binding proteins. These proteins exist in two stages (with bound GTP or GDP), one stage being the activated form of the protein, and one stage being inactive.

[0045] Regulation of protein activity by the action of other enzymes typically takes the form of covalent modification of the protein (i.e., phosphorylation of amino acid residues such as histidine or aspartate, or methylation). Such covalent modification is typically reversible, as mediated by an enzyme of the opposite activity. An example of this is the opposite activities of kinases and phosphorylases in protein phosphorylation; protein kinases phosphorylate specific residues on a target protein (e.g., serine or threonine), while protein phosphorylases remove phosphate groups from such proteins. Typically, enzymes which modulate the activity of other proteins are themselves modulated by external stimuli. These stimuli are mediated through proteins which function as sensors. A well known mechanism by which such sensor proteins may mediate these external signals is by dimerization, but others are also known (see, for example, Msadek, T. et al. (1993) “Two-Component Regulatory Systems”, in: Bacillus subtilis and Other Gram-Positive Bacteria, Sonenshein, A. L. et al., eds., ASM: Washington p. 729-745 and references cited therein).

[0046] A thorough understanding of the regulatory networks governing cellular metabolism in microorganisms is critical for the high-yield production of chemicals by fermentation. Control systems for the down-regulation of metabolic pathways could be removed or lessened to improve the synthesis of desired chemicals, and similarly, those for the up-regulation of metabolic pathways for a desired product could be constitutively activated or optimized in activity (As shown in Hirose, Y. and Okada, H. (1979) “Microbial Production of Amino Acids”, in: Peppler, H. J. and Perlman, D. (eds.) Microbial Technology 2^{nd} ed. Vol. 1, ch. 7 Academic Press: New York.)

III. Elements and Methods of the Invention

[0047] The present invention is based, at least in part, on the discovery of novel molecules, referred to herein as MR nucleic acid and protein molecules, which regulate, by transcriptional, translational, or post-translational means, one or more metabolic pathways in C. glutamicum. In one embodiment, the MR molecules transcriptionally, translationally, or posttranslationally regulate a metabolic pathway in C. glutamicum. In a preferred embodiment, the activity of the MR molecules of the present invention to regulate one or more C. glutamicum metabolic pathways has an impact on the production of a desired fine chemical by this organism. In a particularly preferred embodiment, the MR molecules of the invention are modulated in activity, such that the C. glutamicum metabolic pathways which the MR proteins of the invention regulate are modulated in efficiency or output, which either directly or indirectly modulates the yield, production, and/or efficiency of production of a desired fine chemical by C. glutamicum.

[0048] The language, “MR protein” or “MR polypeptide” includes proteins which transcriptionally, translationally, or posttranslationally regulate a metabolic pathway in C. glutamicum. Examples of MR proteins include those encoded by the MR genes set forth in Table 1 and Appendix A. The terms “MR gene” or “MR nucleic acid sequence” include nucleic acid sequences encoding an MR protein, which consist of a coding region and also corresponding untranslated 5′ and 3′ sequence regions. Examples of MR genes include those set forth in Table 1. The terms “production” or “productivity” are art-recognized and include the concentration of the fermentation product (for example, the desired fine chemical) formed within a given time and a given fermentation volume (e.g., kg product per hour per liter). The term “efficiency of production” includes the time required for a particular level of production to be achieved (for example, how long it takes for the cell to attain a particular rate of output of a fine chemical). The term “yield” or “product/carbon yield” is art-recognized and includes the efficiency of the conversion of the carbon source into the product (i.e., fine chemical). This is generally written as, for example, kg product per kg carbon source. By increasing the yield or production of the compound, the quantity of recovered molecules, or of useful recovered molecules of that compound in a given amount of culture over a given amount of time is increased. The terms “biosynthesis” or a “biosynthetic pathway” are art-recognized and include the synthesis of a compound, preferably an organic compound, by a cell from intermediate compounds in what may be a multistep and highly regulated process. The terms “degradation” or a “degradation pathway” are art-recognized and include the breakdown of a compound, preferably an organic compound, by a cell to degradation products (generally speaking, smaller or less complex molecules) in what may be a multistep and highly regulated process. The language “metabolism” is art-recognized and includes the totality of the biochemical reactions that take place in an organism. The metabolism of a particular compound, then, (e.g., the metabolism of an amino acid such as glycine) comprises the overall biosynthetic, modification, and degradation pathways in the cell related to this compound. The term, “regulation” is art-recognized and includes the activity of a protein to govern the activity of another protein. The term, “transcriptional regulation” is art-recognized and includes the activity of a protein to impede or activate the conversion of a DNA encoding a target protein to mRNA. The term, “translational regulation” is art-recognized and includes the activity of a protein to impede or activate the conversion of an mRNA encoding a target protein to a protein molecule. The term, “posttranslational regulation” is art-recognized and includes the activity of a protein to impede or improve the activity of a target protein by covalently modifying the target protein (e.g., by methylation, glucosylation, or phosphorylation).

[0049] In another embodiment, the MR molecules of the invention are capable of modulating the production of a desired molecule, such as a fine chemical, in a microorganism such as C. glutamicum. Using recombinant genetic techniques, one or more of the regulatory proteins of the invention for metabolic pathways may be manipulated such that its function is modulated. For example, a biosynthetic enzyme may be improved in efficiency, or its allosteric control region destroyed such that feedback inhibition of production of the compound is prevented. Similarly, a degradative enzyme may be deleted or modified by substitution, deletion, or addition such that its degradative activity is lessened for the desired compound without impairing the viability of the cell. In each case, the overall yield or rate of production of one of these desired fine chemicals may be increased.

[0050] It is also possible that such alterations in the protein and nucleotide molecules of the invention may improve the production of fine chemicals in an indirect fashion. The regulatory mechanisms of metabolic pathways in the cell are necessarily intertwined, and the activation of one pathway may lead to the repression or activation of another in a concomitant fashion. Therefore, by modulating the activity of one or more of the proteins of the invention, the production or efficiency of activity of another fine chemical biosynthetic or degradative pathway may be impacted. For example, by decreasing the ability of an MR protein to repress the transcription of a gene encoding a particular amino acid biosynthetic protein, one may concomitantly derepress other amino acid biosynthetic pathways, since these pathways are interrelated. Further, by modifying the MR proteins of the invention, one may uncouple the growth and division of cells from their extracellular surroundings to a certain degree; by impairing an MR protein which normally represses biosynthesis of a nucleotide when the extracellular conditions are suboptimal for growth and cell division such that it now lacks this function, one may permit growth to occur even when the extracellular conditions are poor. This is of particular relevance in large-scale fermentative growth, where conditions within the culture are often suboptimal in terms of temperature, nutrient supply or aeration, but would still support growth and cell division if the cellular regulatory systems for these factors were eliminated.

[0051] The isolated nucleic acid sequences of the invention are contained within the genome of a Corynebacterium glutamicum strain available through the American Type Culture Collection, given designation ATCC 13032. The nucleotide sequence of the isolated C. glutamicum MR DNAs and the predicted amino acid sequences of the C. glutamicum MR proteins are shown in Appendices A and B, respectively. Computational analyses were performed which classified and/or identified these nucleotide sequences as sequences which encode metabolic pathway regulatory proteins.

[0052] The present invention also pertains to proteins which have an amino acid sequence which is substantially homologous to an amino acid sequence of Appendix B. As used herein, a protein which has an amino acid sequence which is substantially homologous to a selected amino acid sequence is least about 50% homologous to the selected amino acid sequence, e.g., the entire selected amino acid sequence. A protein which has an amino acid sequence which is substantially homologous to a selected amino acid sequence can also be least about 50-60%, preferably at least about 60-70%, and more preferably at least about 70-80%, 80-90%, or 90-95%, and most preferably at least about 96%, 97%, 98%, 99% or more homologous to the selected amino acid sequence.

[0053] The MR protein or a biologically active portion or fragment thereof of the invention can transcriptionally, translationally, or posttranslationally regulate a metabolic pathway in C. glutamicum, or have one or more of the activities set forth in Table 1.

[0054] Various aspects of the invention are described in further detail in the following subsections:

A. Isolated Nucleic Acid Molecules

[0055] One aspect of the invention pertains to isolated nucleic acid molecules that encode MR polypeptides or biologically active portions thereof, as well as nucleic acid fragments sufficient for use as hybridization probes or primers for the identification or amplification of MR-encoding nucleic acid (e.g., MR DNA). As used herein, the term “nucleic acid molecule” is intended to include DNA molecules (e.g., cDNA or genomic DNA) and RNA molecules (e.g., mRNA) and analogs of the DNA or RNA generated using nucleotide analogs. This term also encompasses untranslated sequence located at both the 3′ and 5′ ends of the coding region of the gene: at least about 100 nucleotides of sequence upstream from the 5′ end of the coding region and at least about 20 nucleotides of sequence downstream from the 3′ end of the coding region of the gene. The nucleic acid molecule can be single-stranded or double-stranded, but preferably is double-stranded DNA. An “isolated” nucleic acid molecule is one which is separated from other nucleic acid molecules which are present in the natural source of the nucleic acid. Preferably, an “isolated” nucleic acid is free of sequences which naturally flank the nucleic acid (i.e., sequences located at the 5′ and 3′ ends of the nucleic acid) in the genomic DNA of the organism from which the nucleic acid is derived. For example, in various embodiments, the isolated MR nucleic acid molecule can contain less than about 5 kb, 4 kb, 3 kb, 2 kb, 1 kb, 0.5 kb or 0.1 kb of nucleotide sequences which naturally flank the nucleic acid molecule in genomic DNA of the cell from which the nucleic acid is derived (e.g., a C. glutamicum cell). Moreover, an “isolated” nucleic acid molecule, such as a DNA molecule, can be substantially free of other cellular material, or culture medium when produced by recombinant techniques, or chemical precursors or other chemicals when chemically synthesized.

[0056] A nucleic acid molecule of the present invention, e.g., a nucleic acid molecule having a nucleotide sequence of Appendix A, or a portion thereof, can be isolated using standard molecular biology techniques and the sequence information provided herein. For example, a C. glutamicum MR DNA can be isolated from a C. glutamicum library using all or portion of one of the sequences of Appendix A as a hybridization probe and standard hybridization techniques (e.g., as described in Sambrook, J., Fritsh, E. F., and Maniatis, T. Molecular Cloning. A Laboratory Manual. 2nd, ed., Cold Spring Harbor Laboratory, Cold Spring Harbor Laboratory Press, Cold Spring Harbor, N.Y., 1989). Moreover, a nucleic acid molecule encompassing all or a portion of one of the sequences of Appendix A can be isolated by the polymerase chain reaction using oligonucleotide primers designed based upon this sequence (e.g., a nucleic acid molecule encompassing all or a portion of one of the sequences of Appendix A can be isolated by the polymerase chain reaction using oligonucleotide primers designed based upon this same sequence of Appendix A). For example, mRNA can be isolated from normal endothelial cells (e.g., by the guanidinium-thiocyanate extraction procedure of Chirgwin et al. (1979) Biochemistry 18: 5294-5299) and DNA can be prepared using reverse transcriptase (e.g., Moloney MLV reverse transcriptase, available from Gibco/BRL, Bethesda, Md.; or AMV reverse transcriptase, available from Seikagaku America, Inc., St. Petersburg, Fla.). Synthetic oligonucleotide primers for polymerase chain reaction amplification can be designed based upon one of the nucleotide sequences shown in Appendix A. A nucleic acid of the invention can be amplified using cDNA or, alternatively, genomic DNA, as a template and appropriate oligonucleotide primers according to standard PCR amplification techniques. The nucleic acid so amplified can be cloned into an appropriate vector and characterized by DNA sequence analysis. Furthermore, oligonucleotides corresponding to an MR nucleotide sequence can be prepared by standard synthetic techniques, e.g., using an automated DNA synthesizer.

[0057] In a preferred embodiment, an isolated nucleic acid molecule of the invention comprises one of the nucleotide sequences shown in Appendix A. The sequences of Appendix A correspond to the Corynebacterium glutamicum MR DNAs of the invention. This DNA comprises sequences encoding MR proteins (i.e., the “coding region”, indicated in each sequence in Appendix A), as well as 5′ untranslated sequences and 3′ untranslated sequences, also indicated in Appendix A. Alternatively, the nucleic acid molecule can comprise only the coding region of any of the sequences in Appendix A.

[0058] For the purposes of this application, it will be understood that each of the sequences set forth in Appendix A has an identifying RXA, RXN, or RXS number having the designation “RXA”, “RXN”, or “RXS” followed by 5 digits (i.e., RXA00603, RXN03181, or RXS00686). Each of these sequences comprises up to three parts: a 5′ upstream region, a coding region, and a downstream region. Each of these three regions is identified by the same RXA, RXN, or RXS designation to eliminate confusion. The recitation “one of the sequences in Appendix A”, then, refers to any of the sequences in Appendix A, which may be distinguished by their differing RXA, RXN, or RXS designations. The coding region of each of these sequences is translated into a corresponding amino acid sequence, which is set forth in Appendix B. The sequences of Appendix B are identified by the same RXA, RXN, or RXS designations as Appendix A, such that they can be readily correlated. For example, the amino acid sequences in Appendix B designated RXA00603, RXN03181, and RXS00686 are translations of the coding regions of the nucleotide sequence of nucleic acid molecules RXA00603, RXN03181, and RXS00686, respectively, in Appendix A. Each of the RXA, RXN, and RXS nucleotide and amino acid sequences of the invention has also been assigned a SEQ ID NO, as indicated in Table 1. For example, as shown in Table 1, the nucleotide sequence of RXA00603 is SEQ ID NO:5 and the amino acid sequence of RXA00603 is SEQ ID NO: 6.

[0059] Several of the genes of the invention are “F-designated genes”. An F-designated gene includes those genes set forth in Table 1 which have an ‘F’ in front of the RXA, RXN, or RXS designation. For example, SEQ ID NO:3, designated, as indicated on Table 1, as “F RXA02880”, is an F-designated gene, as are SEQ ID NOs: 21, 27, and 33 (designated on Table 1 as “F RXA02493”, “F RXA00291”, and “F RXA00651”, respectively).

[0060] In one embodiment, the nucleic acid molecules of the present invention are not intended to include those compiled in Table 2. In the case of the dapD gene, a sequence for this gene was published in Wehrmann, A., et al. (1998) J. Bacteriol. 180(12): 3159-3165. However, the sequence obtained by the inventors of the present application is significantly longer than the published version. It is believed that the published version relied on an incorrect start codon, and thus represents only a fragment of the actual coding region.

[0061] In another preferred embodiment, an isolated nucleic acid molecule of the invention comprises a nucleic acid molecule which is a complement of one of the nucleotide sequences shown in Appendix A, or a portion thereof A nucleic acid molecule which is complementary to one of the nucleotide sequences shown in Appendix A is one which is sufficiently complementary to one of the nucleotide sequences shown in Appendix A such that it can hybridize to one of the nucleotide sequences shown in Appendix A, thereby forming a stable duplex.

[0062] In still another preferred embodiment, an isolated nucleic acid molecule of the invention comprises a nucleotide sequence which is at least about 50%, 51%, 52%, 53%, 54%, 55%, 56%, 57%, 58%, 59%, or 60%, preferably at least about 61%, 62%, 63%, 64%, 65%, 66%, 67%, 68%, 69%, or 70%, more preferably at least about 71%, 72%, 73%, 74%, 75%, 76%, 77%, 78%, 79%, or 80%, 81%, 82%, 83%, 84%, 85%, 86%, 87%, 88%, 89%, or 90%, or 91%, 92%, 93%, 94%, and even more preferably at least about 95%, 96%, 97%, 98%, 99% or more homologous to a nucleotide sequence shown in Appendix A, or a portion thereof. Ranges and identity values intermediate to the above-recited ranges, (e.g., 70-90% identical or 80-95% identical) are also intended to be encompassed by the present invention. For example, ranges of identity values using a combination of any of the above values recited as upper and/or lower limits are intended to be included. In an additional preferred embodiment, an isolated nucleic acid molecule of the invention comprises a nucleotide sequence which hybridizes, e.g., hybridizes under stringent conditions, to one of the nucleotide sequences shown in Appendix A, or a portion thereof.

[0063] Moreover, the nucleic acid molecule of the invention can comprise only a portion of the coding region of one of the sequences in Appendix A, for example a fragment which can be used as a probe or primer or a fragment encoding a biologically active portion of an MR protein. The nucleotide sequences determined from the cloning of the MR genes from C. glutamicum allows for the generation of probes and primers designed for use in identifying and/or cloning MR homologues in other cell types and organisms, as well as MR homologues from other Corynebacteria or related species. The probe/primer typically comprises substantially purified oligonucleotide. The oligonucleotide typically comprises a region of nucleotide sequence that hybridizes under stringent conditions to at least about 12, preferably about 25, more preferably about 40, 50 or 75 consecutive nucleotides of a sense strand of one of the sequences set forth in Appendix A, an anti-sense sequence of one of the sequences set forth in Appendix A, or naturally occurring mutants thereof. Primers based on a nucleotide sequence of Appendix A can be used in PCR reactions to clone MR homologues. Probes based on the MR nucleotide sequences can be used to detect transcripts or genomic sequences encoding the same or homologous proteins. In preferred embodiments, the probe further comprises a label group attached thereto, e.g. the label group can be a radioisotope, a fluorescent compound, an enzyme, or an enzyme co-factor. Such probes can be used as a part of a diagnostic test kit for identifying cells which misexpress an MR protein, such as by measuring a level of an M4R-encodilng nucleic acid in a sample of cells, e.g., detecting MR mRNA levels or determining whether a genomic MR gene has been mutated or deleted.

[0064] In one embodiment, the nucleic acid molecule of the invention encodes a protein or portion thereof which includes an amino acid sequence which is sufficiently homologous to an amino acid sequence of Appendix B such that the protein or portion thereof maintains the ability to transcriptionally, translationally, or posttranslationally regulate a metabolic pathway in C. glutamicum. As used herein, the language “sufficiently homologous” refers to proteins or portions thereof which have amino acid sequences which include a minimum number of identical or equivalent (e.g., an amino acid residue which has a similar side chain as an amino acid residue in one of the sequences of Appendix B) amino acid residues to an amino acid sequence of Appendix B such that the protein or portion thereof is able to transcriptionally, translationally, or posttranslationally regulate a metabolic pathway in C. glutamicum. Protein members of such metabolic pathways, as described herein, may function to regulate the biosynthesis or degradation of one or more fine chemicals. Examples of such activities are also described herein. Thus, “the function of an MR protein” contributes to the overall regulation of one or more fine chemical metabolic pathway, or contributes, either directly or indirectly, to the yield, production, and/or efficiency of production of one or more fine chemicals. Examples of MR protein activities are set forth in Table 1.

[0065] In another embodiment, the protein is at least about 50-60%, preferably at least about 60-70%, and more preferably at least about 70-80%, 80-90%, 90-95%, and most preferably at least about 96%, 97%, 98%, 99% or more homologous to an entire amino acid sequence of Appendix B.

[0066] Portions of proteins encoded by the MR nucleic acid molecules of the invention are preferably biologically active portions of one of the MR proteins. As used herein, the term “biologically active portion of an MR protein” is intended to include a portion, e.g., a domain/motif, of an MR protein that transcriptionally, translationally, or posttranslationally regulates a metabolic pathway in C. glutamicum, or has an activity as set forth in Table 1. To determine whether an MR protein or a biologically active portion thereof can transcriptionally, translationally, or posttranslationally regulate a metabolic pathway in C. glutamicum, an assay of enzymatic activity may be performed. Such assay methods are well known to those of ordinary skill in the art, as detailed in Example 8 of the Exemplification.

[0067] Additional nucleic acid fragments encoding biologically active portions of an MR protein can be prepared by isolating a portion of one of the sequences in Appendix B, expressing the encoded portion of the MR protein or peptide (e.g., by recombinant expression in vitro) and assessing the activity of the encoded portion of the MR protein or peptide.

[0068] The invention further encompasses nucleic acid molecules that differ from one of the nucleotide sequences shown in Appendix A (and portions thereof) due to degeneracy of the genetic code and thus encode the same MR protein as that encoded by the nucleotide sequences shown in Appendix A. In another embodiment, an isolated nucleic acid molecule of the invention has a nucleotide sequence encoding a protein having an amino acid sequence shown in Appendix B. In a still further embodiment, the nucleic acid molecule of the invention encodes a full length C. glutamicum protein which is substantially homologous to an amino acid sequence of Appendix B (encoded by an open reading frame shown in Appendix A).

[0069] It will be understood by one of ordinary skill in the art that in one embodiment the sequences of the invention are not meant to include the sequences of the prior art, such as those Genbank sequences set forth in Tables 2 or 4 which were available prior to the present invention. In one embodiment, the invention includes nucleotide and amino acid sequences having a percent identity to a nucleotide or amino acid sequence of the invention which is greater than that of a sequence of the prior art (e.g., a Genbank sequence (or the protein encoded by such a sequence) set forth in Tables 2 or 4). For example, the invention includes a nucleotide sequence which is greater than and/or at least 40% identical to the nucleotide sequence designated RXA00603 (SEQ ID NO:5), a nucleotide sequence which is greater than and/or at least 55% identical to the nucleotide sequence designated RXA00129 (SEQ ID NO:29), and a nucleotide sequence which is greater than and/or at least 40% identical to the nucleotide sequence designated RXA00006 (SEQ ID NO:35). One of ordinary skill in the art would be able to calculate the lower threshold of percent identity for any given sequence of the invention by examining the GAP-calculated percent identity scores set forth in Table 4 for each of the three top hits for the given sequence, and by subtracting the highest GAP-calculated percent identity from 100 percent. One of ordinary skill in the art will also appreciate that nucleic acid and amino acid sequences having percent identities greater than the lower threshold so calculated (e.g., at least 50%, 51%, 52%, 53%, 54%, 55%, 56%, 57%, 58%, 59%, or 60%, preferably at least about 61%, 62%, 63%, 64%, 65%, 66%, 67%, 68%, 69%, or 70%, more preferably at least about 71%, 72%, 73%, 74%, 75%, 76%, 77%, 78%, 79%, or 80%, 81%, 82%, 83%, 84%, 85%, 86%, 87%, 88%, 89%, or 90%, or 91%, 92%, 93%, 94%, and even more preferably at least about 95%, 96%, 97%, 98%, 99% or more identical) are also encompassed by the invention.

[0070] In addition to the C. glutamicum MR nucleotide sequences shown in Appendix A, it will be appreciated by those of ordinary skill in the art that DNA sequence polymorphisms that lead to changes in the amino acid sequences of MR proteins may exist within a population (e.g., the C. glutamicum population). Such genetic polymorphism in the MR gene may exist among individuals within a population due to natural variation. As used herein, the terms “gene” and “recombinant gene” refer to nucleic acid molecules comprising an open reading frame encoding an MR protein, preferably a C. glutamicum MR protein. Such natural variations can typically result in 1-5% variance in the nucleotide sequence of the MR gene. Any and all such nucleotide variations and resulting amino acid polymorphisms in MR that are the result of natural variation and that do not alter the functional activity of MR proteins are intended to be within the scope of the invention.

[0071] Nucleic acid molecules corresponding to natural variants and non-C. glutamicum homologues of the C. glutamicum MR DNA of the invention can be isolated based on their homology to the C. glutamicum MR nucleic acid disclosed herein using the C. glutamicum DNA, or a portion thereof, as a hybridization probe according to standard hybridization techniques under stringent hybridization conditions. Accordingly, in another embodiment, an isolated nucleic acid molecule of the invention is at least 15 nucleotides in length and hybridizes under stringent conditions to the nucleic acid molecule comprising a nucleotide sequence of Appendix A. In other embodiments, the nucleic acid is at least 30, 50, 100, 250 or more nucleotides in length. As used herein, the term “hybridizes under stringent conditions” is intended to describe conditions for hybridization and washing under which nucleotide sequences at least 60% homologous to each other typically remain hybridized to each other. Preferably, the conditions are such that sequences at least about 65%, more preferably at least about 70%, and even more preferably at least about 75% or more homologous to each other typically remain hybridized to each other. Such stringent conditions are known to those of ordinary skill in the art and can be found in Current Protocols in Molecular Biology, John Wiley & Sons, N.Y. (1989), 6.3.1-6.3.6. A preferred, non-limiting example of stringent hybridization conditions are hybridization in 6× sodium chloride/sodium citrate (SSC) at about 45° C., followed by one or more washes in 0.2×SSC, 0.1% SDS at 50-65° C. Preferably, an isolated nucleic acid molecule of the invention that hybridizes under stringent conditions to a sequence of Appendix A corresponds to a naturally-occurring nucleic acid molecule. As used herein, a “naturally-occurring” nucleic acid molecule refers to an RNA or DNA molecule having a nucleotide sequence that occurs in nature (e.g., encodes a natural protein). In one embodiment, the nucleic acid encodes a natural C. glutamicum MR protein.

[0072] In addition to naturally-occurring variants of the MR sequence that may exist in the population, one of ordinary skill in the art will further appreciate that changes can be introduced by mutation into a nucleotide sequence of Appendix A, thereby leading to changes in the amino acid sequence of the encoded MR protein, without altering the functional ability of the MR protein. For example, nucleotide substitutions leading to amino acid substitutions at “non-essential” amino acid residues can be made in a sequence of Appendix A. A “non-essential” amino acid residue is a residue that can be altered from the wild-type sequence of one of the MR proteins (Appendix B) without altering the activity of said MR protein, whereas an “essential” amino acid residue is required for MR protein activity. Other amino acid residues, however, (e.g., those that are not conserved or only semi-conserved in the domain having MR activity) may not be essential for activity and thus are likely to be amenable to alteration without altering MR activity.

[0073] Accordingly, another aspect of the invention pertains to nucleic acid molecules encoding MR proteins that contain changes in amino acid residues that are not essential for MR activity. Such MR proteins differ in amino acid sequence from a sequence contained in Appendix B yet retain at least one of the MR activities described herein. In one embodiment, the isolated nucleic acid molecule comprises a nucleotide sequence encoding a protein, wherein the protein comprises an amino acid sequence at least about 50% homologous to an amino acid sequence of Appendix B and is capable of transcriptionally, translationally, or posttranslationally regulating a metabolic pathway in C. glutamicum, or has one or more activities set forth in Table 1. Preferably, the protein encoded by the nucleic acid molecule is at least about 50-60% homologous to one of the sequences in Appendix B, more preferably at least about 60-70% homologous to one of the sequences in Appendix B, even more preferably at least about 70-80%, 80-90%, 90-95% homologous to one of the sequences in Appendix B, and most preferably at least about 96%, 97%, 98%, or 99% homologous to one of the sequences in Appendix B.

[0074] To determine the percent homology of two amino acid sequences (e.g., one of the sequences of Appendix B and a mutant form thereof) or of two nucleic acids, the sequences are aligned for optimal comparison purposes (e.g., gaps can be introduced in the sequence of one protein or nucleic acid for optimal alignment with the other protein or nucleic acid). The amino acid residues or nucleotides at corresponding amino acid positions or nucleotide positions are then compared. When a position in one sequence (e.g., one of the sequences of Appendix B) is occupied by the same amino acid residue or nucleotide as the corresponding position in the other sequence (e.g., a mutant form of the sequence selected from Appendix B), then the molecules are homologous at that position (i.e., as used herein amino acid or nucleic acid “homology” is equivalent to amino acid or nucleic acid “identity”). The percent homology between the two sequences is a function of the number of identical positions shared by the sequences (i.e., % homology=# of identical positions/total # of positions×100).

[0075] An isolated nucleic acid molecule encoding an MR protein homologous to a protein sequence of Appendix B can be created by introducing one or more nucleotide substitutions, additions or deletions into a nucleotide sequence of Appendix A such that one or more amino acid substitutions, additions or deletions are introduced into the encoded protein. Mutations can be introduced into one of the sequences of Appendix A by standard techniques, such as site-directed mutagenesis and PCR-mediated mutagenesis. Preferably, conservative amino acid substitutions are made at one or more predicted non-essential amino acid residues. A “conservative amino acid substitution” is one in which the amino acid residue is replaced with an amino acid residue having a similar side chain. Families of amino acid residues having similar side chains have been defined in the art. These families include amino acids with basic side chains (e.g., lysine, arginine, histidine), acidic side chains (e.g., aspartic acid, glutamic acid), uncharged polar side chains (e.g., glycine, asparagine, glutamine, serine, threonine, tyrosine, cysteine), nonpolar side chains (e.g., alanine, valine, leucine, isoleucine, proline, phenylalanine, methionine, tryptophan), beta-branched side chains (e.g., threonine, valine, isoleucine) and aromatic side chains (e.g., tyrosine, phenylalanine, tryptophan, histidine). Thus, a predicted nonessential amino acid residue in an MR protein is preferably replaced with another amino acid residue from the same side chain family. Alternatively, in another embodiment, mutations can be introduced randomly along all or part of an MR coding sequence, such as by saturation mutagenesis, and the resultant mutants can be screened for an MR activity described herein to identify mutants that retain MR activity. Following mutagenesis of one of the sequences of Appendix A, the encoded protein can be expressed recombinantly and the activity of the protein can be determined using, for example, assays described herein (see Example 8 of the Exemplification).

[0076] In addition to the nucleic acid molecules encoding MR proteins described above, another aspect of the invention pertains to isolated nucleic acid molecules which are antisense thereto. An “antisense” nucleic acid comprises a nucleotide sequence which is complementary to a “sense” nucleic acid encoding a protein, e.g., complementary to the coding strand of a double-stranded DNA molecule or complementary to an mRNA sequence. Accordingly, an antisense nucleic acid can hydrogen bond to a sense nucleic acid. The antisense nucleic acid can be complementary to an entire MR coding strand, or to only a portion thereof. In one embodiment, an antisense nucleic acid molecule is antisense to a “coding region” of the coding strand of a nucleotide sequence encoding an MR protein. The term “coding region” refers to the region of the nucleotide sequence comprising codons which are translated into amino acid residues (e.g., the entire codingregion of SEQ ID NO: I (RXN03181) comprises nucleotides 1 to414). In another embodiment, the antisense nucleic acid molecule is antisense to a “noncoding region” of the coding strand of a nucleotide sequence encoding MR. The term “noncoding region” refers to 5′ and 3′ sequences which flank the coding region that are not translated into amino acids (i.e., also referred to as 5′ and 3′ untranslated regions).

[0077] Given the coding strand sequences encoding MR disclosed herein (e.g., the sequences set forth in Appendix A), antisense nucleic acids of the invention can be designed according to the rules of Watson and Crick base pairing. The antisense nucleic acid molecule can be complementary to the entire coding region of MR mRNA, but more preferably is an oligonucleotide which is antisense to only a portion of the coding or noncoding region of MR mRNA. For example, the antisense oligonucleotide can be complementary to the region surrounding the translation start site of MR mRNA. An antisense oligonucleotide can be, for example, about 5, 10, 15, 20, 25, 30, 35, 40, 45 or 50 nucleotides in length. An antisense nucleic acid of the invention can be constructed using chemical synthesis and enzymatic ligation reactions using procedures known in the art. For example, an antisense nucleic acid (e.g., an antisense oligonucleotide) can be chemically synthesized using naturally occurring nucleotides or variously modified nucleotides designed to increase the biological stability of the molecules or to increase the physical stability of the duplex formed between the antisense and sense nucleic acids, e.g., phosphorothioate derivatives and acridine substituted nucleotides can be used. Examples of modified nucleotides which can be used to generate the antisense nucleic acid include 5-fluorouracil, 5-bromouracil, 5-chlorouracil, 5-iodouracil, hypoxanthine, xanthine, 4-acetylcytosine, 5-(carboxyhydroxylmethyl) uracil, 5-carboxymethylaminomethyl-2-thiouridine, 5-carboxymethylaminomethyluracil, dihydrouracil, beta-D-galactosylqueosine, inosine, N6-isopentenyladenine, 1-methylguanine, 1-methylinosine, 2,2-dimethylguanine, 2-methyladenine, 2-methylguanine, 3-methylcytosine, 5-methylcytosine, N6-adenine, 7-methylguanine, 5-methylarninomethyluracil, 5-methoxyaminomethyl-2-thiouracil, beta-D-mannosylqueosine, 5′-methoxycarboxymethyluracil, 5-methoxyuracil, 2-methylthio-N6-isopentenyladenine, uracil-5-oxyacetic acid (v), wybutoxosine, pseudouracil, queosine, 2-thiocytosine, 5-methyl-2-thiouracil, 2-thiouracil, 4-thiouracil, 5-methyluracil, uracil-5-oxyacetic acid methylester, uracil-5-oxyacetic acid (v), 5-methyl-2-thiouracil, 3-(3-amino-3-N-2-carboxypropyl) uracil, (acp3)w, and 2,6-diaminopurine. Alternatively, the antisense nucleic acid can be produced biologically using an expression vector into which a nucleic acid has been subcloned in an antisense orientation (i.e., RNA transcribed from the inserted nucleic acid will be of an antisense orientation to a target nucleic acid of interest, described further in the following subsection).

[0078] The antisense nucleic acid molecules of the invention are typically administered to a cell or generated in situ such that they hybridize with or bind to cellular mRNA and/or genomic DNA encoding an MR protein to thereby inhibit expression of the protein, e.g., by inhibiting transcription and/or translation. The hybridization can be by conventional nucleotide complementarity to form a stable duplex, or, for example, in the case of an antisense nucleic acid molecule which binds to DNA duplexes, through specific interactions in the major groove of the double helix. The antisense molecule can be modified such that it specifically binds to a receptor or an antigen expressed on a selected cell surface, e.g., by linking the antisense nucleic acid molecule to a peptide or an antibody which binds to a cell surface receptor or antigen. The antisense nucleic acid molecule can also be delivered to cells using the vectors described herein. To achieve sufficient intracellular concentrations of the antisense molecules, vector constructs in which the antisense nucleic acid molecule is placed under the control of a strong prokaryotic, viral, or eukaryotic promoter are preferred.

[0079] In yet another embodiment, the antisense nucleic acid molecule of the invention is an α-anomeric nucleic acid molecule. An α-anomeric nucleic acid molecule forms specific double-stranded hybrids with complementary RNA in which, contrary to the usual β-units, the strands run parallel to each other (Gaultier et al. (1987) Nucleic Acids. Res. 15:6625-6641). The antisense nucleic acid molecule can also comprise a 2′-o-methylribonucleotide (Inoue et al. (1987) Nucleic Acids Res. 15:6131-6148) or a chimeric RNA-DNA analogue (Inoue et al. (1987) FEBS Lett. 215:327-330).

[0080] In still another embodiment, an antisense nucleic acid of the invention is a ribozyme. Ribozymes are catalytic RNA molecules with ribonuclease activity which are capable of cleaving a single-stranded nucleic acid, such as an mRNA, to which they have a complementary region. Thus, ribozymes (e.g., hammerhead ribozymes (described in Haselhoff and Gerlach (1988) Nature 334:585-59 1)) can be used to catalytically cleave MR mRNA transcripts to thereby inhibit translation of MR mRNA. A ribozyme having specificity for an MR-encoding nucleic acid can be designed based upon the nucleotide sequence of an MR DNA disclosed herein (i.e., SEQ ID NO: 1 (RXN03181 in Appendix A)). For example, a derivative of a Tetrahymena L-19 IVS RNA can be constructed in which the nucleotide sequence of the active site is complementary to the nucleotide sequence to be cleaved in an MR-encoding mRNA. See, e.g., Cech et al. U.S. Pat. No. 4,987,071 and Cech et al. U.S. Pat. No. 5,116,742. Alternatively, MR mRNA can be used to select a catalytic RNA having a specific ribonuclease activity from a pool of RNA molecules. See, e.g., Bartel, D. and Szostak, J. W. (1993) Science 261:1411-1418.

[0081] Alternatively, MR gene expression can be inhibited by targeting nucleotide sequences complementary to the regulatory region of an MR nucleotide sequence (e.g., an MR promoter and/or enhancers) to form triple helical structures that prevent transcription of an MR gene in target cells. See generally, Helene, C. (1991) Anticancer Drug Des. 6(6):569-84; Helene, C. et al. (1992) Ann. N.Y. Acad. Sci. 660:27-36; and Maher, L. J. (1992) Bioassays 14(12):807-15.

B. Recombinant Expression Vectors and Host Cells

[0082] Another aspect of the invention pertains to vectors, preferably expression vectors, containing a nucleic acid encoding an MR protein (or a portion thereof). As used herein, the term “vector” refers to a nucleic acid molecule capable of transporting another nucleic acid to which it has been linked. One type of vector is a “plasmid”, which refers to a circular double stranded DNA loop into which additional DNA segments can be ligated. Another type of vector is a viral vector, wherein additional DNA segments can be ligated into the viral genome. Certain vectors are capable of autonomous replication in a host cell into which they are introduced (e.g., bacterial vectors having a bacterial origin of replication and episomal mammalian vectors). Other vectors (e.g., non-episomal mammalian vectors) are integrated into the genome of a host cell upon introduction into the host cell, and thereby are replicated along with the host genome. Moreover, certain vectors are capable of directing the expression of genes to which they are operatively linked. Such vectors are referred to herein as “expression vectors”. In general, expression vectors of utility in recombinant DNA techniques are often in the form of plasmids. In the present specification, “plasmid” and “vector” can be used interchangeably as the plasmid is the most commonly used form of vector. However, the invention is intended to include such other forms of expression vectors, such as viral vectors (e.g., replication defective retroviruses, adenoviruses and adeno-associated viruses), which serve equivalent functions.

[0083] The recombinant expression vectors of the invention comprise a nucleic acid of the invention in a form suitable for expression of the nucleic acid in a host cell, which means that the recombinant expression vectors include one or more regulatory sequences, selected on the basis of the host cells to be used for expression, which is operatively linked to the nucleic acid sequence to be expressed. Within a recombinant expression vector, “operably linked” is intended to mean that the nucleotide sequence of interest is linked to the regulatory sequence(s) in a manner which allows for expression of the nucleotide sequence (e.g., in an in vitro transcription/translation system or in a host cell when the vector is introduced into the host cell). The term “regulatory sequence” is intended to include promoters, enhancers and other expression control elements (e.g., polyadenylation signals). Such regulatory sequences are described, for example, in Goeddel; Gene Expression Technology. Methods in Enzymology 185, Academic Press, San Diego, Calif. (1990). Regulatory sequences include those which direct constitutive expression of a nucleotide sequence in many types of host cell and those which direct expression of the nucleotide sequence only in certain host cells. Preferred regulatory sequences are, for example, promoters such as cos-, tac-, trp-, tet-, trp-tet-, lpp-, lac-, lpp-lac-, lacI^{q}, T7-, T5-, T3-, gal-, trc-, ara-, SP6-, arny, SPO2, π-P_{R}- or πP_{L}, which are used preferably in bacteria. Additional regulatory sequences are, for example, promoters from yeasts and fungi, such as ADC1, MFα, AC, P-60, CYC1, GAPDH, TEF, rp28, ADH, promoters from plants such as CaMV/35S, SSU, OCS, lib4, usp, STLS1, B33, nos or ubiquitin- or phaseolin-promoters. It is also possible to use artificial promoters. It will be appreciated by one of ordinary skill in the art that the design of the expression vector can depend on such factors as the choice of the host cell to be transformed, the level of expression of protein desired, etc. The expression vectors of the invention can be introduced into host cells to thereby produce proteins or peptides, including fusion proteins or peptides, encoded by nucleic acids as described herein (e.g., MR proteins, mutant forms of MR proteins, fusion proteins, etc.).

[0084] The recombinant expression vectors of the invention can be designed for expression of MR proteins in prokaryotic or eukaryotic cells. For example, MR genes can be expressed in bacterial cells such as C. glutamicum, insect cells (using baculovirus expression vectors), yeast and other fungal cells (see Romanos, M. A. et al. (1992) “Foreign gene expression in yeast: a review”, Yeast 8: 423-488; van den Hondel, C. A. M. J. J. et al. (1991) “Heterologous gene expression in filamentous fungi” in: More Gene Manipulations in Fungi, J. W. Bennet & L. L. Lasure, eds., p. 396-428: Academic Press: San Diego; and van den Hondel, C. A. M. J. J. & Punt, P. J. (1991) “Gene transfer systems and vector development for filamentous fungi, in: Applied Molecular Genetics of Fungi, Peberdy, J. F. et al., eds., p. 1-28, Cambridge University Press: Cambridge), algae and multicellular plant cells (see Schmidt, R. and Willmitzer, L. (1988) High efficiency Agrobacterium tumefaciens—mediated transformation of Arabidopsis thaliana leaf and cotyledon explants” Plant Cell Rep.: 583-586), or mammalian cells. Suitable host cells are discussed further in Goeddel, Gene Expression Technology: Methods in Enzymology 185, Academic Press, San Diego, Calif. (1990). Alternatively, the recombinant expression vector can be transcribed and translated in vitro, for example using T7 promoter regulatory sequences and T7 polymerase.

[0085] Expression of proteins in prokaryotes is most often carried out with vectors containing constitutive or inducible promoters directing the expression of either fusion or non-fusion proteins. Fusion vectors add a number of amino acids to a protein encoded therein, usually to the amino terminus of the recombinant protein. Such fusion vectors typically serve three purposes: 1) to increase expression of recombinant protein; 2) to increase the solubility of the recombinant protein; and 3) to aid in the purification of the recombinant protein by acting as a ligand in affinity purification. Often, in fusion expression vectors, a proteolytic cleavage site is introduced at the junction of the fusion moiety and the recombinant protein to enable separation of the recombinant protein from the fusion moiety subsequent to purification of the fusion protein. Such enzymes, and their cognate recognition sequences, include Factor Xa, thrombin and enterokinase.

[0086] Typical fusion expression vectors include pGEX (Pharmacia Biotech Inc; Smith, D. B. and Johnson, K. S. (1988) Gene 67:31-40), pMAL (New England Biolabs, Beverly, Mass.) and pRIT5 (Pharmacia, Piscataway, N.J.) which fuse glutathione S-transferase (GST), maltose E binding protein, or protein A, respectively, to the target recombinant protein. In one embodiment, the coding sequence of the MR protein is cloned into a pGEX expression vector to create a vector encoding a fusion protein comprising, from the N-terminus to the C-terminus, GST-thrombin cleavage site-X protein. The fusion protein can be purified by affinity chromatography using glutathione-agarose resin. Recombinant MR protein unfused to GST can be recovered by cleavage of the fusion protein with thrombin.

[0087] Examples of suitable inducible non-fusion E. coli expression vectors include pTrc (Amann et al., (1988) Gene 69:301-315) pLG338, pACYC184, pBR322, pUC18, pUC19, pKC30, pRep4, pHS1, pHS2, pPLc236, pMBL24, pLG200, pUR290, pIN-III 113-B1, πgt11, pBdC1, and pET 11d (Studier et al., Gene Expression Technology. Methods in Enzymology 185, Academic Press, San Diego, Calif. (1990) 60-89; and Pouwels et al., eds. (1985) Cloning Vectors. Elsevier: New York IBSN 0 444 904018). Target gene expression from the pTrc vector relies on host RNA polymerase transcription from a hybrid trp-lac fusion promoter. Target gene expression from the pET 11d vector relies on transcription from a T7 gn10-lac fusion promoter mediated by a coexpressed viral RNA polymerase (T7 gn1). This viral polymerase is supplied by host strains BL21 (DE3) or HMS174(DE3) from a resident π prophage harboring a T7 gn1 gene under the transcriptional control of the lacUV 5 promoter. For transformation of other varieties of bacteria, appropriate vectors may be selected. For example, the plasmids plJ101, plJ364, pIJ702 and pIJ361 are known to be useful in transforming Streptomyces, while plasmids pUB110, pC194, or pBD214 are suited for transformation of Bacillus species. Several plasmids of use in the transfer of genetic information into Corynebacterium include pHM1519, pBL1, pSA77, or pAJ667 (Pouwvels et al., eds. (1985) Cloning Vectors. Elsevier: New York IBSN 0 444 904018).One strategy to maximize recombinant protein expression is to express the protein in a host bacteria with an impaired capacity to proteolytically cleave the recombinant protein (Gottesman, S., Gene Expression Technology. Methods in Enzymnology 185, Academic Press, San Diego, Calif. (1990) 119-128). Another strategy is to alter the nucleic acid sequence of the nucleic acid to be inserted into an expression vector so that the individual codons for each amino acid are those preferentially utilized in the bacterium chosen for expression, such as C. glutamicum (Wada et al. (1992) Nucleic Acids Res. 20:2111-2118). Such alteration of nucleic acid sequences of the invention can be carried out by standard DNA synthesis techniques.

[0088] In another embodiment, the MR protein expression vector is a yeast expression vector. Examples of vectors for expression in yeast S. cerevisiae include pYepSec1 (Baldari, et al., (1987) Embo J. 6:229-234), 2 μ, pAG-1, Yep6, Yep13, pEMBLYe23, pMFa (Kurjan and Herskowitz, (1982) Cell 30:933-943), pJRY88 (Schultz et al., (1987) Gene 54:113-123), and pYES2 (Invitrogen Corporation, San Diego, Calif.). Vectors and methods for the construction of vectors appropriate for use in other fungi, such as the filamentous fungi, include those detailed in: van den Hondel, C. A. M. J. J. & Punt, P. J. (1991) “Gene transfer systems and vector development for filamentous fungi, in: Applied Molecular Genetics of Fungi, J. F. Peberdy, et al., eds., p. 1-28, Cambridge University Press: Cambridge, and Pouwels et al., eds. (1985) Cloning Vectors. Elsevier: New York (IBSN 0 444 904018).

[0089] Alternatively, the MR proteins of the invention can be expressed in insect cells using baculovirus expression vectors. Baculovirus vectors available for expression of proteins in cultured insect cells (e.g., Sf 9 cells) include the pAc series (Smith et al. (1983) Mol. Cell Biol. 3:2156-2165) and the pVL series (Lucklow and Summers (1989) Virology 170:31-39).

[0090] In another embodiment, the MR proteins of the invention may be expressed in unicellular plant cells (such as algae) or in plant cells from higher plants (e.g., the spermatophytes, such as crop plants). Examples of plant expression vectors include those detailed in: Becker, D., Kemper, E., Schell, J. and Masterson, R. (1992) “New plant binary vectors with selectable markers located proximal to the left border”, Plant Mol. Biol. 20: 1195-1197; and Bevan, M. W. (1984) “Binary Agrobacterium vectors for plant transformation”, Nucl. Acid. Res. 12: 8711-8721, and include pLGV23, pGHlac+, pBIN19, pAK2004, and pDH51 (Pouwels el al., eds. (1985) Cloning Vectors. Elsevier: New York IBSN 0 444 904018).

[0091] In yet another embodiment, a nucleic acid of the invention is expressed in mammalian cells using a mammalian expression vector. Examples of mammalian expression vectors include pCDM8 (Seed, B. (1987)Nature 329:840) and pMT2PC (Kaufman e al. (1 987) EMBO J. 6:187-195). When used in mammalian cells, the expression vector's control functions are often provided by viral regulatory elements. For example, commonly used promoters are derived from polyoma, Adenovirus 2, cytomegalovirus and Simian Virus 40. For other suitable expression systems for both prokaryotic and eukaryotic cells see chapters 16 and 17 of Sambrook, J., Fritsh, E. F., and Maniatis, T. Molecular Cloning. A Laboratory Manual. 2nd, ed., Cold Spring Harbor Laboratory, Cold Spring Harbor Laboratory Press, Cold Spring Harbor, N.Y., 1989.

[0092] In another embodiment, the recombinant mammalian expression vector is capable of directing expression of the nucleic acid preferentially in a particular cell type (e.g., tissue-specific regulatory elements are used to express the nucleic acid). Tissue-specific regulatory elements are known in the art. Non-limiting examples of suitable tissue-specific promoters include the albumin promoter (liver-specific; Pinkert et al. (1987) Genes Dev. 1:268-277), lymphoid-specific promoters (Calame and Eaton (1988) Adv. Immunol. 43:235-275), in particular promoters of T cell receptors (Winoto and Baltimore (1989) EMBO J. 8:729-733) and immunoglobulins (Banerji et al. (1983) Cell 33:729-740; Queen and Baltimore (1983) Cell 33:741-748), neuron-specific promoters (e.g., the neurofilament promoter; Byrne and Ruddle (1989) PNAS 86:5473-5477), pancreas-specific promoters (Edlund et al. (1985) Science 230:912-916), and mammary gland-specific promoters (e.g., milk whey promoter; U.S. Pat. No. 4,873,316 and European Application Publication No. 264,166). Developmentally-regulated promoters are also encompassed, for example the murine hox promoters (Kessel and Gruss (1990) Science 249:374-379) and the α-fetoprotein promoter (Campes and Tilghman (1989) Genes Dev. 3:537-546).

[0093] The invention further provides a recombinant expression vector comprising a DNA molecule of the invention cloned into the expression vector in an antisense orientation. That is, the DNA molecule is operatively linked to a regulatory sequence in a manner which allows for expression (by transcription of the DNA molecule) of an RNA molecule which is antisense to MR mRNA. Regulatory sequences operatively linked to a nucleic acid cloned in the antisense orientation can be chosen which direct the continuous expression of the antisense RNA molecule in a variety of cell types, for instance viral promoters and/or enhancers, or regulatory sequences can be chosen which direct constitutive, tissue specific or cell type specific expression of antisense RNA. The antisense expression vector can be in the form of a recombinant plasmid, phagemid or attenuated virus in which antisense nucleic acids are produced under the control of a high efficiency regulatory region, the activity of which can be determined by the cell type into which the vector is introduced. For a discussion of the regulation of gene expression using antisenise genes see Weintraub, H. el al., Antisenise RNA as a molecular tool for genetic analysis, Reviews-Trends in Genetics, Vol. 1(1) 1986.

[0094] Another aspect of the invention pertains to host cells into which a recombinant expression vector of the invention has been introduced. The terms “host cell” and “recombinant host cell” are used interchangeably herein. It is understood that such terms refer not only to the particular subject cell but to the progeny or potential progeny of such a cell. Because certain modifications may occur in succeeding generations due to either mutation or environmental influences, such progeny may not, in fact, be identical to the parent cell, but are still included within the scope of the term as used herein.

[0095] A host cell can be any prokaryotic or eukaryotic cell. For example, an MR protein can be expressed in bacterial cells such as C. glutamicum, insect cells, yeast or mammalian cells (such as Chinese hamster ovary cells (CHO) or COS cells). Other suitable host cells are known to one of ordinary skill in the art. Microorganisms related to Corynebacterium glutamicum which may be conveniently used as host cells for the nucleic acid and protein molecules of the invention are set forth in Table 3.

[0096] Vector DNA can be introduced into prokaryotic or eukaryotic cells via conventional transformation or transfection techniques. As used herein, the terms “transformation” and “transfection” are intended to refer to a variety of art-recognized techniques for introducing foreign nucleic acid (e.g., linear DNA or RNA (e.g., a linearized vector or a gene construct alone without a vector) or nucleic acid in the form of a vector (e.g., a plasmid, phage, plasmid, phagemid, transposon or other DNA) into a host cell, including calcium phosphate or calcium chloride co-precipitation, DEAE-dextran-mediated transfection, lipofection, or electroporation. Suitable methods for transforming or transfecting host cells can be found in Sambrook, el al. (Molecular Cloning: A Laboratory Manual. 2nd, ed., Cold Spring Harbor Laboratory, Cold Spring Harbor Laboratory Press, Cold Spring Harbor, N.Y., 1989), and other laboratory manuals.

[0097] For stable transfection of mammalian cells, it is known that, depending upon the expression vector and transfection technique used, only a small fraction of cells may integrate the foreign DNA into their genome. In order to identify and select these integrants, a gene that encodes a selectable marker (e.g., resistance to antibiotics) is generally introduced into the host cells along with the gene of interest. Preferred selectable markers include those which confer resistance to drugs, such as G418, hygromycin and methotrexate. Nucleic acid encoding a selectable marker can be introduced into a host cell on the same vector as that encoding an MR protein or can be introduced on a separate vector. Cells stably transfected with the introduced nucleic acid can be identified by, for example, drug selection (e.g., cells that have incorporated the selectable marker gene will survive, while the other cells die).

[0098] To create a homologous recombinant microorganism, a vector is prepared which contains at least a portion of an MR gene into which a deletion, addition or substitution has been introduced to thereby alter, e.g., functionally disrupt, the MR gene. Preferably, this MR gene is a Corynebacterium glutamicum MR gene, but it can be a homologue from a related bacterium or even from a mammalian, yeast, or insect source. In a preferred embodiment, the vector is designed such that, upon homologous recombination, the endogenous MR gene is functionally disrupted (i.e., no longer encodes a functional protein; also referred to as a “knock out” vector). Alternatively, the vector can be designed such that, upon homologous recombination, the endogenous MR gene is mutated or otherwise altered but still encodes functional protein (e.g., the upstream regulatory region can be altered to thereby alter the expression of the endogenous MR protein). In the homologous recombination vector, the altered portion of the MR gene is flanked at its 5′ and 3′ ends by additional nucleic acid of the MR gene to allow for homologous recombination to occur between the exogenous MR gene carried by the vector and an endogenous MR gene in a microorganism. The additional flanking MR nucleic acid is of sufficient length for successful homologous recombination with the endogenous gene. Typically, several kilobases of flanking DNA (both at the 5′ and 3′ ends) are included in the vector (see e.g., Thomas, K. R., and Capecchi, M. R. (1987) Cell 51: 503 for a description of homologous recombination vectors). The vector is introduced into a microorganism (e.g., by electroporation) and cells in which the introduced MR gene has homologously recombined with the endogenous MR gene are selected, using art-known techniques.

[0099] In another embodiment, recombinant microorganisms can be produced which contain selected systems which allow for regulated expression of the introduced gene.

[0100] For example, inclusion of an MR gene on a vector placing it under control of the lac operon permits expression of the MR gene only in the presence of IPTG. Such regulatory systems are well known in the art.

[0101] In another embodiment, an endogenous MR gene in a host cell is disrupted (e.g., by homologous recombination or other genetic means known in the art) such that expression of its protein product does not occur. In another embodiment, an endogenous or introduced MR gene in a host cell has been altered by one or more point mutations, deletions, or inversions, but still encodes a functional MR protein. In still another embodiment, one or more of the regulatory regions (e.g., a promoter, repressor, or inducer) of an MR gene in a microorganism has been altered (e.g., by deletion, truncation, inversion, or point mutation) such that the expression of the MR gene is modulated. One of ordinary skill in the art will appreciate that host cells containing more than one of the described MR gene and protein modifications may be readily produced using the methods of the invention, and are meant to be included in the present invention.

[0102] A host cell of the invention, such as a prokaryotic or eukaryotic host cell in culture, can be used to produce (i.e., express) an MR protein. Accordingly, the invention further provides methods for producing MR proteins using the host cells of the invention. In one embodiment, the method comprises culturing the host cell of invention (into which a recombinant expression vector encoding an MR protein has been 1 5 introduced, or into which genome has been introduced a gene encoding a wild-type or altered MR protein) in a suitable medium until MR protein is produced. In another embodiment, the method further comprises isolating MR proteins from the medium or the host cell.

C. Isolated MR Proteins

[0103] Another aspect of the invention pertains to isolated MR proteins, and biologically active portions thereof. An “isolated” or “purified” protein or biologically active portion thereof is substantially free of cellular material when produced by recombinant DNA techniques, or chemical precursors or other chemicals when chemically synthesized. The language “substantially free of cellular material” includes preparations of MR protein in which the protein is separated from cellular components of the cells in which it is naturally or recombinantly produced. In one embodiment, the language “substantially free of cellular material” includes preparations of MR protein having less than about 30% (by dry weight) of non-MR protein (also referred to herein as a “contaminating protein”), more preferably less than about 20% of non-MR protein, still more preferably less than about 10% of non-MR protein, and most preferably less than about 5% non-MR protein. When the MR protein or biologically active portion thereof is recombinantly produced, it is also preferably substantially free of culture medium, i.e., culture medium represents less than about 20%, more preferably less than about 10%, and most preferably less than about 5% of the volume of the protein preparation. The language “substantially free of chemical precursors or other chemicals” includes preparations of MR protein in which the protein is separated from chemical precursors or other chemicals which are involved in the synthesis of the protein. In one embodiment, the language “substantially free of chemical precursors or other chemicals” includes preparations of MR protein having less than about 30% (by dry weight) of chemical precursors or non-MR chemicals, more preferably less than about 20% chemical precursors or non-MR chemicals, still more preferably less than about 10% chemical precursors or non-MR chemicals, and most preferably less than about 5% chemical precursors or noni-MR chemicals. In preferred embodiments, isolated proteins or biologically active portions thereof lack contaminating proteins from the same organism from which the MR protein is derived. Typically, such proteins are produced by recombinant expression of, for example, a C. glutamicum MR protein in a microorganism such as C. glutamicum.

[0104] An isolated MR protein or a portion thereof of the invention can transcriptionally, translationally, or posttranslationally regulate a metabolic pathway in C. glutamicum, or has one or more of the activities set forth in Table 1. In preferred embodiments, the protein or portion thereof comprises an amino acid sequence which is sufficiently homologous to an amino acid sequence of Appendix B such that the protein or portion thereof maintains the ability to transcriptionally, translationally, or posttranslationally regulate a metabolic pathway in C. glutamicum. The portion of the protein is preferably a biologically active portion as described herein. In another preferred embodiment, an MR protein of the invention has an amino acid sequence shown in Appendix B. In yet another preferred embodiment, the MR protein has an amino acid sequence which is encoded by a nucleotide sequence which hybridizes, e.g., hybridizes under stringent conditions, to a nucleotide sequence of Appendix A. In still another preferred embodiment, the MR protein has an amino acid sequence which is encoded by a nucleotide sequence that is at least about 50%, 51%, 52%, 53%, 54%, 55%, 56%, 57%, 58%, 59%, or 60%, preferably at least about 61%, 62%, 63%, 64%, 65%, 66%, 67%, 68%, 69%, or 70%, more preferably at least about 71%, 72%, 73%, 74%, 75%, 76%, 77%, 78%, 79%, or 80%, 81%, 82%, 83%, 84%, 85%, 86%, 87%, 88%, 89%, or 90%, or 91%, 92%, 93%, 94%, and even more preferably at least about 95%, 96%, 97%, 98%, 99% or more homologous to one of the nucleic acid sequences of Appendix A, or a portion thereof. Ranges and identity values intermediate to the above-recited values, (e.g., 70-90% identical or 80-95% identical) are also intended to be encompassed by the present invention. For example, ranges of identity values using a combination of any of the above values recited as upper and/or lower limits are intended to be included. The preferred MR proteins of the present invention also preferably possess at least one of the MR activities described herein. For example, a preferred MR protein of the present invention includes an amino acid sequence encoded by a nucleotide sequence which hybridizes, e.g., hybridizes under stringent conditions, to a nucleotide sequence of Appendix A, and which can transcriptionally, translationally, or posttranslationally regulate a metabolic pathway in C. glutamicum, or which has one or more of the activities set forth in Table 1.

[0105] In other embodiments, the MR protein is substantially homologous to an amino acid sequence of Appendix B and retains the functional activity of the protein of one of the sequences of Appendix B yet differs in amino acid sequence due to natural variation or mutagenesis, as described in detail in subsection I above. Accordingly, in another-embodiment, the MR protein is a protein which comprises an amino acid sequence which is at least about 50%, 51%, 52%, 53%, 54%, 55%, 56%, 57%, 58%, 59%, or 60%, preferably at least about 61%, 62%, 63%, 64%, 65%, 66%, 67%, 68%, 69%, or 70%, more preferably at least about 71%, 72%, 73%, 74%, 75%, 76%, 77%, 78%, 79%, or 80%, 81%, 82%, 83%, 84%, 85%, 86%, 87%, 88%, 89%, or 90%, or 91%, 92%, 93%, 94%, and even more preferably at least about 95%, 96%, 97%, 98%, 99%or more homologous to an entire amino acid sequence of Appendix B and which has at least one of the MR activities described herein. Ranges and identity values intermediate to the above-recited values, (e.g., 70-90% identical or 80-95% identical) are also intended to be encompassed by the present invention. For example, ranges of identity values using a combination of any of the above values recited as upper and/or lower limits are intended to be included. In another embodiment, the invention pertains to a full length C. glutamicum protein which is substantially homologous to an entire amino acid sequence of Appendix B.

[0106] Biologically active portions of an MR protein include peptides comprising amino acid sequences derived from the amino acid sequence of an MR protein, e.g., the an amino acid sequence shown in Appendix B or the amino acid sequence of a protein homologous to an MR protein, which include fewer amino acids than a full length MR protein or the full length protein which is homologous to an MR protein, and exhibit at least one activity of an MR protein. Typically, biologically active portions (peptides, e.g., peptides which are, for example, 5, 10, 15, 20, 30, 35, 36, 37, 38, 39, 40, 50, 100 or more amino acids in length) comprise a domain or motif with at least one activity of an MR protein. Moreover, other biologically active portions, in which other regions of the protein are deleted, can be prepared by recombinant techniques and evaluated for one or more of the activities described herein. Preferably, the biologically active portions of an MR protein include one or more selected domains/motifs or portions thereof having biological activity.

[0107] MR proteins are preferably produced by recombinant DNA techniques. For example, a nucleic acid molecule encoding the protein is cloned into an expression vector (as described above), the expression vector is introduced into a host cell (as described above) and the MR protein is expressed in the host cell. The MR protein can then be isolated from the cells by an appropriate purification scheme using standard protein purificationi techniques. Alternative to recombinant expression, an MR protein, polypeptide, or peptide can be synthesized chemically using standard peptide synthesis techniques. Moreover, native MR protein can be isolated from cells (e.g., endothelial cells), for example using an anti-MR antibody, which can be produced by standard techniques utilizing an MR protein or fragment thereof of this invention.

[0108] The invention also provides MR chimeric or fusion proteins. As used herein, an MR “chimeric protein” or “fusion protein” comprises an MR polypeptide operatively linked to a non-MR polypeptide. An “MR polypeptide” refers to a polypeptide having an amino acid sequence corresponding to an MR protein, whereas a “non-MR polypeptide” refers to a polypeptide having an amino acid sequence corresponding to a protein which is not substantially homologous to the MR protein, e.g., a protein which is different from the MR protein and which is derived from the same or a different organism. Within the fusion protein, the term “operatively linked” is intended to indicate that the MR polypeptide and the non-MR polypeptide are fused in-frame to each other. The non-MR polypeptide can be fused to the N-terminus or C-terminus of the MR polypeptide. For example, in one embodiment the fusion protein is a GST-MR fusion protein in which the MR sequences are fused to the C-terminus of the GST sequences. Such fusion proteins can facilitate the purification of recombinant MR proteins. In another embodiment, the fusion protein is an MR protein containing a heterologous signal sequence at its N-terminus. In certain host cells (e.g., mammalian host cells), expression and/or secretion of an MR protein can be increased through use of a heterologous signal sequence.

[0109] Preferably, an MR chimeric or fusion protein of the invention is produced by standard recombinant DNA techniques. For example, DNA fragments coding for the different polypeptide sequences are ligated together in-frame in accordance with conventional techniques, for example by employing blunt-ended or stagger-ended termini for ligation, restriction enzyme digestion to provide for appropriate termini, filling-in of cohesive ends as appropriate, alkaline phosphatase treatment to avoid undesirable joining, and enzymatic ligation. In another embodiment, the fusion gene can be synthesized by conventional techniques including automated DNA synthesizers. Alternatively, PCR amplification of gene fragments can be carried out using anchor primers which give rise to complementary overhangs between two consecutive gene fragments which can subsequently be annealed and reamplified to generate a chimeric gene sequence (see, for example, Current Protocols in Molecular Biology, eds. Ausubel et al. John Wiley & Sons: 1992). Moreover, many expression vectors are commercially available that already encode a fusion moiety (e.g., a GST polypeptide). An MR-encoding nucleic acid can be cloned into such an expression vector such that the fusion moiety is linked in-frame to the MR protein.

[0110] Homologues of the MR protein can be generated by mutagenesis, e.g., discrete point mutation or truncation of the MR protein. As used herein, the term “homologue“refers to a variant form of the MR protein which acts as an agonist or antagonist of the activity of the MR protein. An agonist of the MR protein can retain substantially the same, or a subset, of the biological activities of the MR protein. An antagonist of the MR protein can inhibit one or more of the activities of the naturally occurring form of the MR protein, by, for example, competitively binding to a downstream or upstream member of the MR regulatory cascade which includes the MR protein. Thus, the C. glutamicum MR protein and homologues thereof of the present invention may modulate the activity of one or more metabolic pathways which MR proteins regulate in this microorganism.

[0111] In an alternative embodiment, homologues of the MR protein can be identified by screening combinatorial libraries of mutants, e.g., truncation mutants, of the MR protein for MR protein agonist or antagonist activity. In one embodiment, a variegated library of MR variants is generated by combinatorial mutagenesis at the nucleic acid level and is encoded by a variegated gene library. A variegated library of MR variants can be produced by, for example, enzymatically ligating a mixture of synthetic oligonucleotides into gene sequences such that a degenerate set of potential MR sequences is expressible as individual polypeptides, or alternatively, as a set of larger fusion proteins (e.g., for phage display) containing the set of MR sequences therein. There are a variety of methods which can be used to produce libraries of potential MR homologues from a degenerate oligonucleotide sequence. Chemical synthesis of a degenerate gene sequence can be performed in an automatic DNA synthesizer, and the synthetic gene then ligated into an appropriate expression vector. Use of a degenerate set of genes allows for the provision, in one mixture, of all of the sequences encoding the desired set of potential MR sequences. Methods for synthesizing degenerate oligonucleotides are known in the art (see, e.g., Narang, S. A. (1983) Tetrahedron 39:3; Itakura et al. (1984) Annu. Rev. Biochem. 53:323; Itakura et al. (1984) Science 198:1056; Ike et al. (1983) Nucleic Acid Res. 11:477.

[0112] In addition, libraries of fragments of the MR protein coding can be used to generate a variegated population of MR fragments for screening and subsequent selection of homologues of an MR protein. In one embodiment, a library of coding sequence fragments can be generated by treating a double stranded PCR fragment of an MR coding sequence with a nuclease under conditions wherein nicking occurs only about once per molecule, denaturing the double stranded DNA, renaturing the DNA to form double stranded DNA which can include sense/antisense pairs from different nicked products, remolding single stranded portions from reformed duplexes by treatment with S1 nuclease, and ligating the resulting fragment library into an expression vector. By this method, an expression library can be derived which encodes N-terminal, C-terminal and internal fragments of various sizes of the MR protein.

[0113] Several techniques are known in the art for screening gene products of combinatorial libraries made by point mutations or truncation, and for screening cDNA libraries for gene products having a selected property. Such techniques are adaptable for rapid screening of the gene libraries generated by the combinatorial mutagenesis of MR homologues. The most widely used techniques, which are amenable to high through-put analysis, for screening large gene libraries typically include cloning the gene library into replicable expression vectors, transforming appropriate cells with the resulting library of vectors, and expressing the combinatorial genes under conditions in which detection of a desired activity facilitates isolation of the vector encoding the gene whose product was detected. Recursive ensemble mutagenesis (REM), a new technique which enhances the frequency of functional mutants in the libraries, can be used in combination with the screening assays to identify MR homologues (Arkin and Yourvan (1992) PNAS 89:7811-7815; Delgrave et al. (1993) Protein Engineering 6(3):327-331).

[0114] In another embodiment, cell based assays can be exploited to analyze a variegated MR library, using methods well known in the art.

D. Uses and Methods of the Invention

[0115] The nucleic acid molecules, proteins, protein homologues, fusion proteins, primers, vectors, and host cells described herein can be used in one or more of the following methods: identification of C. glutamicum and related organisms; mapping of genomes of organisms related to C. glutamicum; identification and localization of C. glutamicum sequences of interest; evolutionary studies; determination of MR protein regions required for function; modulation of an MR protein activity; modulation of the activity of one or more metabolic pathways; and modulation of cellular production of a desired compound, such as a fine chemical.

[0116] The MR nucleic acid molecules of the invention have a variety of uses. First, they may be used to identify an organism as being Corynebacterium glutamicum or a close relative thereof. Also, they may be used to identify the presence of C. glutamicum or a relative thereof in a mixed population of microorganisms. The invention provides the nucleic acid sequences of a number of C. glutamicum genes; by probing the extracted genomic DNA of a culture of a unique or mixed population of microorganisms under stringent conditions with a probe spanning a region of a C. glutamicum gene which is unique to this organism, one can ascertain whether this organism is present.

[0117] Although Corynebacterium glutamicum itself is nonpathogenic, it is related to pathogenic species, such as Corynebacterium diphtheriae. Corynebacteriuim diphtheriae is the causative agent of diphtheria, a rapidly developing, acute, febrile infection which involves both local and systemic pathology. In this disease, a local lesion develops in the upper respiratory tract and involves necrotic injury to epithelial cells; the bacilli secrete toxin which is disseminated through this lesion to distal susceptible tissues of the body. Degenerative changes brought about by the inhibition of protein synthesis in these tissues, which include heart, muscle, peripheral nerves, adrenals, kidneys, liver and spleen, result in the systemic pathology of the disease. Diphtheria continues to have high incidence in many parts of the world, including Africa, Asia, Eastern Europe and the independent states of the former Soviet Union. An ongoing epidemic of diphtheria in the latter two regions has resulted in at least 5,000 deaths since 1990.

[0118] In one embodiment, the invention provides a method of identifying the presence or activity of Corynebacterium diphtheriae in a subject. This method includes detection of one or more of the nucleic acid or amino acid sequences of the invention (e.g., the sequences set forth in Appendix A or Appendix B) in a subject, thereby detecting the presence or activity of Corynebacterium diphtheriae in the subject. C. glutamicum and C. diphtheriae are related bacteria, and many of the nucleic acid and protein molecules in C. glutamicum are homologous to C. diphtheriae nucleic acid and protein molecules, and can therefore be used to detect C. diphtheriae in a subject.

[0119] The nucleic acid and protein molecules of the invention may also serve as markers for specific regions of the genome. This has utility not only in the mapping of the genome, but also for functional studies of C. glutamicum proteins. For example, to identify the region of the genome to which a particular C. glutamicum DNA-binding protein binds, the C. glutamicum genome could be digested, and the fragments incubated with the DNA-binding protein. Those which bind the protein may be additionally probed with the nucleic acid molecules of the invention, preferably with readily detectable labels; binding of such a nucleic acid molecule to the genome fragment enables the localization of the fragment to the genome map of C. glutamicum, and, when performed multiple times with different enzymes, facilitates a rapid determination of the nucleic acid sequence to which the protein binds. Further, the nucleic acid molecules of the invention may be sufficiently homologous to the sequences of related species such that these nucleic acid molecules may serve as markers for the construction of a genomic map in related bacteria, such as Brevibacterium lactofermentum.

[0120] The MR nucleic acid molecules of the invention are also useful for evolutionary and protein structural studies. The metabolic processes in which the molecules of the invention participate are utilized by a wide variety of prokaryotic and eukaryotic cells; by comparing the sequences of the nucleic acid molecules of the present invention to those encoding similar enzymes from other organisms, the evolutionary relatedness of the organisms can be assessed. Similarly, such a comparison permits an assessment of which regions of the sequence are conserved and which are not, which may aid in determining those regions of the protein which are essential for the functioning of the enzyme. This type of determination is of value for protein engineering studies and may give an indication of what the protein can tolerate in terms of mutagenesis without losing function.

[0121] Manipulation of the MR nucleic acid molecules of the invention may result in the production of MR proteins having functional differences from the wild-type MR proteins. These proteins may be improved in efficiency or activity, may be present in greater numbers in the cell than is usual, or may be decreased in efficiency or activity.

[0122] The invention provides methods for screening molecules which modulate the activity of an MR protein, either by interacting with the protein itself or a substrate or binding partner of the MR protein, or by modulating the transcription or translation of an MR nucleic acid molecule of the invention. In such methods, a microorganism expressing one or more MR proteins of the invention is contacted with one or more test compounds, and the effect of each test compound on the activity or level of expression of the MR protein is assessed.

[0123] Such changes in activity may directly modulate the yield, production, and/or efficiency of production of one or more fine chemicals from C. glutamicum. For example, by optimizing the activity of an MR protein which activates the transcription or translation of a gene encoding a biosynthetic protein for a desired fine chemical, or by impairing or abrogating the activity of an MR protein which represses the transcription or translation of such a gene, one may also increase the activity or rate of activity of that biosynthetic pathway due to the presence of increased levels of what may have been a limiting enzyme. Similarly, by altering the activity of an MR protein such that it constitutively posttranslationally inactivates a protein involved in a degradation pathway for a desired fine chemical, or by altering the activity of an MR protein such that it constitutively represses the transcription or translation of such a gene, one may increase the yield and/or rate of production of the fine chemical from the cell, due to decreased degradation of the compound.

[0124] Further, by modulating the activity of one or more MR proteins, one may indirectly stimulate the production or improve the rate of production of one or more fine chemicals from the cell due to the interrelatedness of disparate metabolic pathways. For example, by increasing the yield, production, and/or efficiency of production by activating the expression of one or more lysine biosynthetic enzymes, one may concomitantly increase the expression of other compounds, such as other amino acids, which the cell would naturally require in greater quantities when lysine is required in greater quantities. Also, regulation of metabolism throughout the cell may be altered such that the cell is better able to grow or replicate under the environmental conditions of fermentative culture (where nutrient and oxygen supplies may be poor and possibly toxic waste products in the environment may be at high levels). For example, by mutagenizing an MR protein which represses the synthesis of molecules necessary for cell membrane production in response to high levels of waste products in the extracellular medium (in order to block cell growth and division in suboptimal growth conditions) such that it no longer is able to repress such synthesis, one may increase the growth and multiplication of the cell in cultures even when the growth conditions are suboptimal. Such enhanced growth or viability should also increase the yields and/or rate of production of a desired fine chemical from fermentative culture, due to the relatively greater number of cells producing this compound in the culture.

[0125] The aforementioned mutagenesis strategies for MR proteins to result in increased yields of a fine chemical from C. glutamicum are not meant to be limiting; variations on these strategies will be readily apparent to one of ordinary skill in the art. Using such strategies, and incorporating the mechanisms disclosed herein, the nucleic acid and protein molecules of the invention may be utilized to generate C. glutamicum or related strains of bacteria expressing mutated MR nucleic acid and protein molecules such that the yield and/or efficiency of production of a desired compound is improved. This desired compound may be any natural product of C. glutamicum, which includes the final products of biosynthesis pathways and intermediates of naturally-occurring metabolic pathways, as well as molecules which do not naturally occur in the metabolism of C. glutamicum, but which are produced by a C. glutamicum strain of the invention.

[0126] This invention is further illustrated by the following examples which should not be construed as limiting. The contents of all references, patent applications, patents, published patent applications, Tables, Appendices, and the sequence listing cited throughout this application are hereby incorporated by reference.

Exemplification

### EXAMPLE 1

### Preparation of Total Genomic DNA of Corytiebacterium glutamicum ATCC 13032

[0127] A culture of Corynebacterium glutamicum (ATCC 13032) was grown overnight at 30° C. with vigorous shaking in BHI medium (Difco). The cells were harvested by centrifugation, the supernatant was discarded and the cells were resuspended in 5 ml buffer-I (5% of the original volume of the culture—all indicated volumes have been calculated for 100 ml of culture volume). Composition of buffer-I: 140.34 g/l sucrose, 2.46 g/l MgSO₄×7H₂O, 10 ml/l KH₂PO₄ solution (100 g/l, adjusted to pH 6.7 with KOH), 50 ml/l M12 concentrate (10 g/l (NH₄)₂SO₄, 1 g/l NaCl, 2 g/l MgSO₄×7H₂O, 0.2 g/l CaCl₂, 0.5 g/l yeast extract (Difco), 10 ml/l trace-elements-mix (200 mg/l FeSO₄ ×H₂O, 10 mg/l ZnSO₄×7 H₂O, 3 mg/l MnCl₂×4 H₂O, 30 mg/l H₃BO₃ 20 mg/l CoCl₂×6 H₂O, 1 mg/l NiCl₂×6 H₂O, 3 mg/l Na₂MoO₄×2 H₂O, 500 mg/l complexing agent (EDTA or critic acid), 100 ml/l vitamins-mix (0.2 mg/l biotin, 0.2 mg/l folic acid, 20 mg/l p-amino benzoic acid, 20 mg/l riboflavin, 40 mg/l ca-panthothenate, 140 mg/l nicotinic acid, 40 mg/l pyridoxole hydrochloride, 200 mg/l myo-inositol). Lysozyme was added to the suspension to a final concentration of 2.5 mg/ml. After an approximately 4 h incubation at 37° C., the cell wall was degraded and the resulting protoplasts are harvested by centrifugation. The pellet was washed once with 5 ml buffer-I and once with 5 ml TE-buffer (10 mM Tris-HCl, 1 mM EDTA, pH 8). The pellet was resuspended in 4 ml TE-buffer and 0.5 ml SDS solution (10%) and 0.5 ml NaCl solution (5 M) are added. After adding of proteinase K to a final concentration of 200 μg/ml, the suspension is incubated for ca. 18 h at 37° C. The DNA was purified by extraction with phenol, phenol-chloroform-isoamylalcohol and chloroform-isoamylalcohol using standard procedures. Then, the DNA was precipitated by adding 1/50 volume of 3 M sodium acetate and 2 volumes of ethanol, followed by a 30 min incubation at −20° C. and a 30 min centrifugation at 12,000 rpm in a high speed centrifuge using a SS34 rotor (Sorvall). The DNA was dissolved in 1 ml TE-buffer containing 20 μg/ml RNaseA and dialysed at 4° C. against 1000 ml TE-buffer for at least 3 hours. During this time, the buffer was exchanged 3 times. To aliquots of 0.4 ml of the dialysed DNA solution, 0.4 ml of 2 M LiCl and 0.8 ml of ethanol are added. After a 30 min incubation at −20° C., the DNA was collected by centrifugation (13,000 rpm, Biofuge Fresco, Heraeus, Hanau, Germany). The DNA pellet was dissolved in TE-buffer. DNA prepared by this procedure could be used for all purposes, including southern blotting or construction of genomic libraries.

### EXAMPLE 2

### Construction of Genomic Libraries in Esclherichia coli of Corynebacterium glutamicum ATCC13032.

[0128] Using DNA prepared as described in Example 1, cosmid and plasmid libraries were constructed according to known and well established methods (see e.g., Sambrook, J. el al. (1989) “Molecular Cloning: A Laboratory Manual”, Cold Spring Harbor Laboratory Press, or Ausubel, F. M. el al. (1994) “Current Protocols in Molecular Biology”, John Wiley & Sons.)

[0129] Any plasmid or cosmid could be used. Of particular use were the plasmids pBR322 (Sutcliffe, J. G. (1979) Proc. Natl. Acad. Sci. USA, 75:3737-3741); pACYC177 (Change & Cohen (1978) J. Bacteriol 134:1141-1156), plasmids of the pBS series (pBSSK+, pBSSK− and others; Stratagene, LaJolla, USA), or cosmids as SuperCos1 (Stratagene, LaJolla, USA) or Lorist6 (Gibson, T. J., Rosenthal A. and Waterson, R. H. (1987) Gene 53:283-286. Gene libraries specifically for use in C. glutamicum may be constructed using plasmid pSL109 (Lee, H.-S. and A. J. Sinskey (1994) J. Microbiol. Biotechnol. 4: 256-263).

### EXAMPLE 3

### DNA Sequencing and Computational Functional Analysis

[0130] Genomic libraries as described in Example 2 were used for DNA sequencing according to standard methods, in particular by the chain termination method using AB1377 sequencing machines (see e.g., Fleischman, R. D. et al. (1995) “Whole-genome Random Sequencing and Assembly of Haemophilus Influenzae Rd., Science, 269:496-512). Sequencing primers with the following nucleotide sequences were used: 5′-GGAAACAGTATGACCATG-3′ or 5′-GTAAAACGACGGCCAGT-3′.

### EXAMPLE 4

### In Vivo Mutagenesis

[0131] In vivo mutagenesis of Corynebacterium glutamicum can be performed by passage of plasmid (or other vector) DNA through E. coli or other microorganisms (e.g. Bacillus spp. or yeasts such as Saccharomyces cerevisiae) which are impaired in their capabilities to maintain the integrity of their genetic information. Typical mutator strains have mutations in the genes for the DNA repair system (e.g., mutHLS, mutD, mutT, etc.; for reference, see Rupp, W. D. (1996) DNA repair mechanisms, in: Escherichia coli and Salmonella, p. 2277-2294, ASM: Washington.) Such strains are well known to one of ordinary skill in the art. The use of such strains is illustrated, for example, in Greener, A. and Callahan, M. (1994) Strategies 7: 32-34.

### EXAMPLE 5

### DNA Transfer Between Escherichia coli and Corynebacterium glutamicum

[0132] Several Corynebacterium and Brevibacterium species contain endogenous plasmids (as e.g., pHM1519 or pBL1) which replicate autonomously (for review see, e.g., Martin, J. F. el al. (1987) Biotechnology, 5:137-146). Shuttle vectors for Escherichia coli and Corynebacterium glutamicum can be readily constructed by using standard vectors for E. coli (Sambrook, J. et al. (1989), “Molecular Cloning: A Laboratory Manual”, Cold Spring Harbor Laboratory Press or Ausubel, F. M. el al. (1994) “Current Protocols in Molecular Biology”, John Wiley & Sons) to which a origin or replication for and a suitable marker from Corynebacterium glutamicum is added. Such origins of replication are preferably taken from endogenous plasmids isolated from Corynebacterium and Brevibacterium species. Of particular use as transformation markers for these species are genes for kanamycin resistance (such as those derived from the Tn5 or Tn903 transposons) or chloramphenicol (Winnacker, E. L. (1987) “From Genes to Clones—Introduction to Gene Technology, VCH, Weinheim). There are numerous examples in the literature of the construction of a wide variety of shuttle vectors which replicate in both E. coli and C. glutamicum, and which can be used for several purposes, including gene over-expression (for reference, see e.g., Yoshihama, M. et al. (1985) J. Bacteriol. 162:591-597, Martin J. F. et al. (1987) Biotechnology, 5:137-146 and Eikmanns, B. J. et al. (1991) Gene, 102:93-98).

[0133] Using standard methods, it is possible to clone a gene of interest into one of the shuttle vectors described above and to introduce such a hybrid vectors into strains of Corynebacterium glutamicum. Transformation of C. glutamicum can be achieved by protoplast transformation (Kastsumata, R. et al. (1984) J. Bacteriol. 159306-311), electroporation (Liebl, E. et al. (1989) FEMS Microbiol. Letters, 53 :399-303) and in cases where special vectors are used, also by conjugation (as described e.g. in Schäfer, A et al. (1990) J. Bacteriol. 172:1663 -1666). It is also possible to transfer the shuttle vectors for C. glutamicum to E. coli by preparing plasmid DNA from C. glutamicum (using standard methods well-known in the art) and transforming it into E. coli. This transformation step can be performed using standard methods, but it is advantageous to use an Mcr-deficient E. coli strain, such as NM522 (Gough & Murray (1983) J. Mol. Biol. 166:1-19).

[0134] Genes may be overexpressed in C. glutamicum strains using plasmids which comprise pCG1 (U.S. Pat. No. 4,617,267) or fragments thereof, and optionally the gene for kanamycin resistance from TN903 (Grindley, N. D. and Joyce, C. M. (1980) Proc. Natl. Acad. Sci. USA 77(12): 7176-7180). In addition, genes may be overexpressed in C. glutamicum strains using plasmid pSL109 (Lee, H.-S. and A. J. Sinskey (1994) J. Microbiol. Biotechnol. 4: 256-263).

[0135] Aside from the use of replicative plasmids, gene overexpression can also be achieved by integration into the genome. Genomic integration in C. glutamicum or other Corynebacterium or Brevibacterium species may be accomplished by well-known methods, such as homologous recombination with genomic region(s), restriction endonuclease mediated integration (REMI) (see, e.g., DE Patent 19823834), or through the use of transposons. It is also possible to modulate the activity of a gene of interest by modifying the regulatory regions (e.g., a promoter, a repressor, and/or an enhancer) by sequence modification, insertion, or deletion using site-directed methods (such as homologous recombination) or methods based on random events (such as transposon mutagenesis or REMI). Nucleic acid sequences which function as transcriptional terminators may also be inserted 3′ to the coding region of one or more genes of the invention; such terminators are well-known in the art and are described, for example, in Winnacker, E. L. (1987) From Genes to Clones—Introduction to Gene Technology. VCH: Weinheim.

### EXAMPLE 6

### Assessment of the Expression of the Mutant Protein

[0136] Observations of the activity of a mutated protein in a transformed host cell rely on the fact that the mutant protein is expressed in a similar fashion and in a similar quantity to that of the wild-type protein. A useful method to ascertain the level of transcription of the mutant gene (an indicator of the amount of mRNA available for translation to the gene product) is to perform a Northern blot (for reference see, for example, Ausubel et al. (1988) Current Protocols in Molecular Biology, Wiley: N.Y.), in which a primer designed to bind to the gene of interest is labeled with a detectable tag (usually radioactive or chemiluminescent), such that when the total RNA of a culture of the organism is extracted, run on gel, transferred to a stable matrix and incubated with this probe, the binding and quantity of binding of the probe indicates the presence and also the quantity of mRNA for this gene. This information is evidence of the degree of transcription of the mutant gene. Total cellular RNA can be prepared from Corynebacterium glutamicum by several methods, all well-known in the art, such as that described in Bormann, E. R. et al. (1992) Mol. Microbiol. 6: 317-326.

[0137] To assess the presence or relative quantity of protein translated from this mRNA, standard techniques, such as a Western blot, may be employed (see, for example, Ausubel et al. (1988) Current Protocols in Molecular Biology, Wiley: N.Y.). In this process, total cellular proteins are extracted, separated by gel electrophoresis, transferred to a matrix such as nitrocellulose, and incubated with a probe, such as an antibody, which specifically binds to the desired protein. This probe is generally tagged with a chemiluminescent or colorimetric label which may be readily detected. The presence and quantity of label observed indicates the presence and quantity of the desired mutant protein present in the cell.

### EXAMPLE 7

### Growth of Genetically Modified Corynebacterium glutamicum—Media and Culture Conditions

[0138] Genetically modified Corynebacteria are cultured in synthetic or natural growth media. A number of different growth media for Corynebacteria are both well-known and readily available (Lieb el al. (1989) Appl. Microbiol. Biolechnol., 32:205-210; von der Osten el al. (1998) Biotechnology Letters, 11:11-16; Patent DE 4,120,867; Liebl (1992) “The Genus Corynebacterium, in: The Procaryotes, Volume II, Balows, A. et al., eds. Springer-Verlag). These media consist of one or more carbon sources, nitrogen sources, inorganic salts, vitamins and trace elements. Preferred carbon sources are sugars, such as mono-, di-, or polysaccharides. For example, glucose, fructose, mannose, galactose, ribose, sorbose, ribulose, lactose, maltose, sucrose, raffinose, starch or cellulose serve as very good carbon sources. It is also possible to supply sugar to the media via complex compounds such as molasses or other by-products from sugar refinement. It can also be advantageous to supply mixtures of different carbon sources. Other possible carbon sources are alcohols and organic acids, such as methanol, ethanol, acetic acid or lactic acid. Nitrogen sources are usually organic or inorganic nitrogen compounds, or materials which contain these compounds. Exemplary nitrogen sources include ammonia gas or ammonia salts, such as NH₄Cl or (NH₄)₂SO₄, NH₄OH, nitrates, urea, amino acids or complex nitrogen sources like corn steep liquor, soy bean flour, soy bean protein, yeast extract, meat extract and others.

[0139] Inorganic salt compounds which may be included in the media include the chloride-, phosphorous- or sulfate- salts of calcium, magnesium, sodium, cobalt, molybdenum, potassium, manganese, zinc, copper and iron. Chelating compounds can be added to the medium to keep the metal ions in solution. Particularly useful chelating compounds include dihydroxyphenols, like catechol or protocatechuate, or organic acids, such as citric acid. It is typical for the media to also contain other growth factors, such as vitamins or growth promoters, examples of which include biotin, riboflavin, thiamin, folic acid, nicotinic acid, pantothenate and pyridoxin. Growth factors and salts frequently originate from complex media components such as yeast extract, molasses, corn steep liquor and others. The exact composition of the media compounds depends strongly on the immediate experiment and is individually decided for each specific case. Information about media optimization is available in the textbook “Applied Microbiol. Physiology, A Practical Approach (eds. P. M. Rhodes, P. F. Stanbury, IRL Press (1997) pp.53-73, ISBN 0 19 963577 3). It is also possible to select growth media from commercial suppliers, like standard 1 (Merck) or BHI (grain heart infusion, DIFCO) or others.

[0140] All medium components are sterilized, either by heat (20 minutes at 1.5 bar and 121° C.) or by sterile filtration. The components can either be sterilized together or, if necessary, separately. All media components can be present at the beginning of growth, or they can optionally be added continuously or batchwise.

[0141] Culture conditions are defined separately for each experiment. The temperature should be in a range between 15° C. and 45° C. The temperature can be kept constant or can be altered during the experiment. The pH of the medium should be in the range of 5 to 8.5, preferably around 7.0, and can be maintained by the addition of buffers to the media. An exemplary buffer for this purpose is a potassium phosphate buffer. Synthetic buffers such as MOPS, HEPES, ACES and others can alternatively or simultaneously be used. It is also possible to maintain a constant culture pH through the addition of NaOH or NH₄OH during growth. If complex medium components such as yeast extract are utilized, the necessity for additional buffers may be reduced, due to the fact that many complex compounds have high buffer capacities. If a fermentor is utilized for culturing the micro-organisms, the pH can also be controlled using gaseous ammonia.

[0142] The incubation time is usually in a range from several hours to several days. This time is selected in order to permit the maximal amount of product to accumulate in the broth. The disclosed growth experiments can be carried out in a variety of vessels, such as microtiter plates, glass tubes, glass flasks or glass or metal fermentors of different sizes. For screening a large number of clones, the microorganisms should be cultured in microtiter plates, glass tubes or shake flasks, either with or without baffles. Preferably 100 ml shake flasks are used, filled with 10% (by volume) of the required growth medium. The flasks should be shaken on a rotary shaker (amplitude 25 mm) using a speed-range of 100-300 rpm. Evaporation losses can be diminished by the maintenance of a humid atmosphere; alternatively, a mathematical correction for evaporation losses should be performed.

[0143] If genetically modified clones are tested, an unmodified control clone or a control clone containing the basic plasmid without any insert should also be tested. The medium is inoculated to an OD₆₀₀ of O.5-1.5 using cells grown on agar plates, such as CM plates (10 g/l glucose, 2.5 g/l NaCl, 2 g/l urea, 10 g/l polypeptone, 5 g/l yeast extract, 5 g/l meat extract, 22 g/l NaCl, 2 g/l urea, 10 g/l polypeptone, 5 g/l yeast extract, 5 g/l meat extract, 22 g/l agar, pH 6.8 with 2M NaOH) that had been incubated at 30° C. Inoculation of the media is accomplished by either introduction of a saline suspension of C. glutamicum cells from CM plates or addition of a liquid preculture of this bacterium.

### EXAMPLE 8

### In Vitro Analysis of the Function of Mutant Proteins

[0144] The determination of activities and kinetic parameters of enzymes is well established in the art. Experiments to determine the activity of any given altered enzyme must be tailored to the specific activity of the wild-type enzyme, which is well within the ability of one of ordinary skill in the art. Overviews about enzymes in general, as well as specific details concerning structure, kinetics, principles, methods, applications and examples for the determination of many enzyme activities may be found, for example, in the following references: Dixon, M., and Webb, E. C., (1979) Enzymes. Longmans: London; Fersht, (1985) Enzyme Structure and Mechanism. Freeman: N.Y.; Walsh, (1979) Enzymatic Reaction Mechanisms. Freeman: San Francisco; Price, N.C., Stevens, L. (1982) Fundamentals of Enzymology. Oxford Univ. Press: Oxford; Boyer, P. D., ed. (1983) The Enzymes, 3^{rd} ed. Academic Press: New York; Bisswanger, H., (1 994) Enzymkinetik, 2^{nd} ed. VCH: Weinheim (ISBN 3527300325); Bergmeyer, H. U., Bergmeyer, J., Graβl, M., eds. (1983-1986) Methods of Enzymatic Analysis, 3^{rd} ed., vol. I-XII, Verlag Chemie: Weinheim; and Ullmann's Encyclopedia of Industrial Chemistry (1987) vol. A9, “Enzymes”. VCH: Weinheim, p. 352-363.

[0145] The activity of proteins which bind to DNA can be measured by several well-established methods, such as DNA band-shift assays (also called gel retardation assays). The effect of such proteins on the expression of other molecules can be measured using reporter gene assays (such as that described in Kolmar, H. et al. (1995) EMBO J 14: 3895-3904 and references cited therein). Reporter gene test systems are well known and established for applications in both pro- and eukaryotic cells, using enzymes such as beta-galactosidase, green fluorescent protein, and several others.

[0146] The determination of activity of membrane-transport proteins can be performed according to techniques such as those described in Gennis, R. B. (1989) “Pores, Channels and Transporters”, in Biomembranes, Molecular Structure and Function, Springer: Heidelberg, p. 85-137; 199-234; and 270-322.

### EXAMPLE 9

### Analysis of Impact of Mutant Protein on the Production of the Desired Product

[0147] The effect of the genetic modification in C. glutamicum on production of a desired compound (such as an amino acid) can be assessed by growing the modified microorganism under suitable conditions (such as those described above) and analyzing the medium and/or the cellular component for increased production of the desired product (i.e., an amino acid). Such analysis techniques are well known to one of ordinary skill in the art, and include spectroscopy, thin layer chromatography, staining methods of various kinds, enzymatic and microbiological methods, and analytical chromatography such as high performance liquid chromatography (see, for example, Ullman, Encyclopedia of Industrial Chemistry, vol. A2, p. 89-90 and p. 443-613, VCH: Weinheim (1985); Fallon, A. et al., (1987) “Applications of HPLC in Biochemistry” in: Laboratory Techniques in Biochemistry and Molecular Biology, vol. 17; Rehm et al. (1993) Biotechnology, vol. 3, Chapter III: “Product recovery and purification”, page 469-714, VCH: Weinheim; Belter, P. A. el at. (1988) Bioseparations: downstream processing for biotechnology, John Wiley and Sons; Kennedy, J. F. and Cabral, J. M. S. (1992) Recovery processes for biological materials, John Wiley and Sons; Shaeiwitz, J. A. and Henry, J. D. (1988) Biochemical separations, in: Ulmann's Encyclopedia of Industrial Chemistry, vol. B3, Chapter 11, page 1-27, VCH: Weinheim; and Dechow, F. J. (1989) Separation and purification techniques in biotechnology, Noyes Publications.)

[0148] In addition to the measurement of the final product of fermentation, it is also possible to analyze other components of the metabolic pathways utilized for the production of the desired compound, such as intermediates and side-products, to determine the overall yield, production, and/or efficiency of production of the compound. Analysis methods include measurements of nutrient levels in the medium (e.g., sugars, hydrocarbons, nitrogen sources, phosphate, and other ions), measurements of biomass composition and growth, analysis of the production of common metabolites of biosynthetic pathways, and measurement of gasses produced during fermentation. Standard methods for these measurements are outlined in Applied Microbial Physiology, A Practical Approach, P. M. Rhodes and P. F. Stanbury, eds., IRL Press, p. 103-129; 131-163; and 165-192 (ISBN: 0199635773) and references cited therein.

### EXAMPLE 10

### Purification of the Desired Product from C. glutamicum Culture

[0149] Recovery of the desired product from the C. glutamicum cells or supernatant of the above-described culture can be performed by various methods well known in the art. If the desired product is not secreted from the cells, the cells can be harvested from the culture by low-speed centrifugation, the cells can be lysed by standard techniques, such as mechanical force or sonication. The cellular debris is removed by centrifugation, and the supernatant fraction containing the soluble proteins is retained for further purification of the desired compound. If the product is secreted from the C. glutamicum cells, then the cells are removed from the culture by low-speed centrifugation, and the supernate fraction is retained for further purification.

[0150] The supernatant fraction from either purification method is subjected to chromatography with a suitable resin, in which the desired molecule is either retained on a chromatography resin while many of the impurities in the sample are not, or where the impurities are retained by the resin while the sample is not. Such chromatography steps may be repeated as necessary, using the same or different chromatography resins. One of ordinary skill in the art would be well-versed in the selection of appropriate chromatography resins and in their most efficacious application for a particular molecule to be purified. The purified product may be concentrated by filtration or ultrafiltration, and stored at a temperature at which the stability of the product is maximized.

[0151] There are a wide array of purification methods known to the art and the preceding method of purification is not meant to be limiting. Such purification techniques are described, for example, in Bailey, J. E. & Ollis, D. F. Biochemical Engineering Fundamentals, McGraw-Hill: New York (1986).

[0152] The identity and purity of the isolated compounds may be assessed by techniques standard in the art. These include high-performance liquid chromatography (HPLC), spectroscopic methods, staining methods, thin layer chromatography, NIRS, enzymatic assay, or microbiologically. Such analysis methods are reviewed in: Patek et al. (1994) Appl. Environ. Microbiol. 60: 133-140; Malakiova et al. (1996) Biotekhnologiya 11: 27-32; and Schmidt et al. (1998) Bioprocess Engineer. 19: 67-70. Ulmann's Encyclopedia of Industrial Chemistry, (1996) vol. A27, VCH: Weinheim, p. 89-90, p. 521-540, p. 540-547, p. 559-566, 575-581 and p. 581-587; Michal, G. (1999) Biochemical Pathways: An Atlas of Biochemistry and Molecular Biology, John Wiley and Sons; Fallon, A. et al. (1987) Applications of HPLC in Biochemistry in: Laboratory Techniques in Biochemistry and Molecular Biology, vol. 17.

### EXAMPLE 11

### Analysis of the Gene Sequences of the Invention

[0153] The comparison of sequences and determination of percent homology between two sequences are art-known techniques, and can be accomplished using a mathematical algorithm, such as the algorithm of Karlin and Altschul (1990) Proc. Natl. Acad. Sci. USA 87:2264-68, modified as in Karlin and Altschul (1993) Proc. Natl. Acad. Sci. USA 90:5873-77. Such an algorithm is incorporated into the NBLAST and XBLAST programs (version 2.0) of Altschul, et al. (1990) J. Mol. Biol. 215:403-10. BLAST nucleotide searches can be performed with the NBLAST program, score=100, wordlength=12 to obtain nucleotide sequences homologous to MR nucleic acid molecules of the invention. BLAST protein searches can be performed with the XBLAST program, score=50, wordlength=3 to obtain amino acid sequences homologous to MR protein molecules of the invention. To obtain gapped alignments for comparison purposes, Gapped BLAST can be utilized as described in Altschul et al., (1997) Nucleic Acids Res. 25(17):3389-3402. When utilizing BLAST and Gapped BLAST programs, one of ordinary skill in the art will know how to optimize the parameters of the program (e.g., XBLAST and NBLAST) for the specific sequence being analyzed.

[0154] Another example of a mathematical algorithm utilized for the comparison of sequences is the algorithm of Meyers and Miller ((1988) Comput. Appl. Biosci. 4: 11-17). Such an algorithm is incorporated into the ALIGN program (version 2.0) which is part of the GCG sequence alignment software package. When utilizing the ALIGN program for comparing amino acid sequences, a PAM120 weight residue table, a gap length penalty of 12, and a gap penalty of 4 can be used. Additional algorithms for sequence analysis are known in the art, and include ADVANCE and ADAM described in Torelli and Robotti (1994) Comput. Appli. Biosci. 10:3-5; and FASTA, described in Pearson and Lipman (1988) P.N.A.S. 85:2444-8.

[0155] The percent homology between two amino acid sequences can also be accomplished using the GAP program in the GCG software package (available at http://www.gcg.com), using either a Blosum 62 matrix or a PAM250 matrix, and a gap weight of 12, 10, 8, 6, or 4 and a length weight of 2, 3, or 4. The percent homology between two nucleic acid sequences can be accomplished using the GAP program in the GCG software package, using standard parameters, such as a gap weight of 50 and a length weight of 3.

[0156] A comparative analysis of the gene sequences of the invention with those present in Genbank has been performed using techniques known in the art (see, e.g., Bexevanis and Ouellette, eds. (1998) Bioinformatics: A Practical Guide to the Analysis of Genes and Proteins. John Wiley and Sons: New York). The gene sequences of the invention were compared to genes present in Genbank in a three-step process. In a first step, a BLASTN analysis (e.g., a local alignment analysis) was performed for each of the sequences of the invention against the nucleotide sequences present in Genbank, and the top 500 hits were retained for further analysis. A subsequent FASTA search (e.g., a combined local and global alignment analysis, in which limited regions of the sequences are aligned) was performed on these 500 hits. Each gene sequence of the invention was subsequently globally aligned to each of the top three FASTA hits, using the GAP program in the GCG software package (using standard parameters). In order to obtain correct results, the length of the sequences extracted from Genbank were adjusted to the length of the query sequences by methods well-known in the art. The results of this analysis are set forth in Table 4. The resulting data is identical to that which would have been obtained had a GAP (global) analysis alone been performed on each of the genes of the invention in comparison with each of the references in Genbank, but required significantly reduced computational time as compared to such a database-wide GAP (global) analysis. Sequences of the invention for which no alignments above the cutoff values were obtained are indicated on Table 4 by the absence of alignment information. It will further be understood by one of ordinary skill in the art that the GAP alignment homology percentages set forth in Table 4 under the heading “% homology (GAP)” are listed in the European numerical format, wherein a ‘,’ represents a decimal point. For example, a value of “40,345” in this column represents “40.345%”.

### EXAMPLE 12

### Construction and Operation of DNA Microarrays

[0157] The sequences of the invention may additionally be used in the construction and application of DNA microarrays (the design, methodology, and uses of DNA arrays are well known in the art, and are described, for example, in Schena, M. et al. (1995) Science 270: 467-470; Wodicka, L. et al. (1997) Nature Biotechnology 15: 1359-1367; DeSaizieu, A. et al. (1998) Nature Biotechnology 16: 45-48; and DeRisi, J. L. et al. (1997) Science 278: 680-686).

[0158] DNA microarrays are solid or flexible supports consisting of nitrocellulose, nylon, glass, silicone, or other materials. Nucleic acid molecules may be attached to the surface in an ordered manner. After appropriate labeling, other nucleic acids or nucleic acid mixtures can be hybridized to the immobilized nucleic acid molecules, and the label may be used to monitor and measure the individual signal intensities of the hybridized molecules at defined regions. This methodology allows the simultaneous quantification of the relative or absolute amount of all or selected nucleic acids in the applied nucleic acid sample or mixture. DNA microarrays, therefore, permit an analysis of the expression of multiple (as many as 6800 or more) nucleic acids in parallel (see, e.g., Schena, M. (1996) BioEssays 18(5): 427-431).

[0159] The sequences of the invention may be used to design oligonucleotide primers which are able to amplify defined regions of one or more C. glutamicum genes by a nucleic acid amplification reaction such as the polymerase chain reaction. The choice and design of the 5′ or 3′ oligonucleotide primers or of appropriate linkers allows the covalent attachment of the resulting PCR products to the surface of a support medium described above (and also described, for example, Schena, M. et al. (1995) Science 270: 467-470).

[0160] Nucleic acid microarrays may also be constructed by in situ oligonucleotide synthesis as described by Wodicka, L. et al. (1997) Nature Biotechnology 15: 1359-1367. By photolithographic methods, precisely defined regions of the matrix are exposed to light. Protective groups which are photolabile are thereby activated and undergo nucleotide addition, whereas regions that are masked from light do not undergo any modification. Subsequent cycles of protection and light activation permit the synthesis of different oligonucleotides at defined positions. Small, defined regions of the genes of the invention may be synthesized on microarrays by solid phase oligonucleotide synthesis.

[0161] The nucleic acid molecules of the invention present in a sample or mixture of nucleotides may be hybridized to the microarrays. These nucleic acid molecules can be labeled according to standard methods. In brief, nucleic acid molecules (e.g., mRNA molecules or DNA molecules) are labeled by the incorporation of isotopically or fluorescently labeled nucleotides, e.g., during reverse transcription or DNA synthesis. Hybridization of labeled nucleic acids to microarrays is described (e.g., in Schena, M. et al. (1995) supra; Wodicka, L. et al. (1997), szipra; and DeSaizieu A. et al. (1998), supra). The detection and quantification of the hybridized molecule are tailored to the specific incorporated label. Radioactive labels can be detected, for example, as described in Schena, M. et al. (1995) supra) and fluorescent labels may be detected, for example, by the method of Shalon et al. (1996) Genome Research 6: 639-645).

[0162] The application of the sequences of the invention to DNA microarray technology, as described above, permits comparative analyses of different strains of C. glutamicum or other Corynebacteria. For example, studies of inter-strain variations based on individual transcript profiles and the identification of genes that are important for specific and/or desired strain properties such as pathogenicity, productivity and stress tolerance are facilitated by nucleic acid array methodologies. Also, comparisons of the profile of expression of genes of the invention during the course of a fermentation reaction are possible using nucleic acid array technology.

### EXAMPLE 13

### Analysis of the Dynamics of Cellular Protein Populations (Proteomics)

[0163] The genes, compositions, and methods of the invention may be applied to study the interactions and dynamics of populations of proteins, termed ‘proteomics’. Protein populations of interest include, but are not limited to, the total protein population of C. glutamicum (e.g., in comparison with the protein populations of other organisms), those proteins which are active under specific environmental or metabolic conditions (e.g., during fermentation, at high or low temperature, or at high or low pH), or those proteins which are active during specific phases of growth and development.

[0164] Protein populations can be analyzed by various well-known techniques, such as gel electrophoresis. Cellular proteins may be obtained, for example, by lysis or extraction, and may be separated from one another using a variety of electrophoretic techniques. Sodium dodecyl sulfate polyacrylamide gel electrophoresis (SDS-PAGE) separates proteins largely on the basis of their molecular weight. Isoelectric focusing polyacrylamide gel electrophoresis (IEF-PAGE) separates proteins by their isoelectric point (which reflects not only the amino acid sequence but also posttranslational modifications of the protein). Another, more preferred method of protein analysis is the consecutive combination of both IEF-PAGE and SDS-PAGE, known as 2-D-gel electrophoresis (described, for example, in Hermann el al. (1998) Electrophoresis 19: 3217-3221; Fountoulakis et al. (1998) Electrophoresis 19: 1193-1202; Langen et al. (1997) Electrophoresis 18: 1184-1192; Antelmann el al. (1997) Electrophoresis 18: 1451-1463). Other separation techniques may also be utilized for protein separation, such as capillary gel electrophoresis; such techniques are well known in the art.

[0165] Proteins separated by these methodologies can be visualized by standard techniques, such as by staining or labeling. Suitable stains are known in the art, and include Coomassie Brilliant Blue, silver stain, or fluorescent dyes such as Sypro Ruby (Molecular Probes). The inclusion of radioactively labeled amino acids or other protein precursors (e.g., ³⁵ S-cysteine, ¹⁴C-labelled amino acids, ¹⁵N-amino acids, ¹⁵NO₃ or ¹⁵NH₄⁺ or ¹³C-labelled amino acids) in the medium of C. glutamicum permits the labeling of proteins from these cells prior to their separation. Similarly, fluorescent labels may be employed. These labeled proteins can be extracted, isolated and separated according to the previously described techniques.

[0166] Proteins visualized by these techniques can be further analyzed by measuring the amount of dye or label used. The amount of a given protein can be determined quantitatively using, for example, optical methods and can be compared to the amount of other proteins in the same gel or in other gels. Comparisons of proteins on gels can be made, for example, by optical comparison, by spectroscopy, by image scanning and analysis of gels, or through the use of photographic films and screens. Such techniques are well-known in the art.

[0167] To determine the identity of any given protein, direct sequencing or other standard techniques may be employed. For example, N— and/or C-terminal amino acid sequencing (such as Edman degradation) may be used, as may mass spectrometry (in particular MALDI or ESI techniques (see, e.g., Langen et al. (1997) Electrophoresis 18: 1184-1192)). The protein sequences provided herein can be used for the identification of C. glutamicum proteins by these techniques.

[0168] The information obtained by these methods can be used to compare patterns of protein presence, activity, or modification between different samples from various biological conditions (e.g., different organisms, time points of fermentation, media conditions, or different biotopes, among others). Data obtained from such experiments alone, or in combination with other techniques, can be used for various applications, such as to compare the behavior of various organisms in a given (e.g., metabolic) situation, to increase the productivity of strains which produce fine chemicals or to increase the efficiency of the production of fine chemicals.

Equivalents

[0169] Those of ordinary skill in the art will recognize, or will be able to ascertain using no more than routine experimentation, many equivalents to the specific embodiments of the invention described herein. Such equivalents are intended to be encompassed by the following claims.

TABLE 1
GENES INCLUDED IN THE APPLICATION

| Nucleic | Amino | | | | | |
|---|---|---|---|---|---|---|
| Acid | Acid | Identifi- | | | | |
| SEQ | SEQ | cation | | NT | NT | |
| ID NO | ID NO | Code | Contig. | Start | Stop | Function |
| 1 | 2 | RXN03181 | VV0338 | 196 | 609 | GLUCOSE-RESISTANCE AMYLASE REGULATOR |
| 3 | 4 | F RXA02880 | GR10018 | 417 | 4 | TRANSCRIPTIONAL REPRESSOR CYTR |
| 5 | 6 | RXA00603 | GR00159 | 4982 | 5434 | LEUCINE-RESPONSIVE REGULATORY PROTEIN |
| 7 | 8 | RXN02946 | VV0127 | 7000 | 7458 | FATTY ACYL RESPONSIVE REGULATOR |
| 9 | 10 | RXN01845 | VV0234 | 1093 | 686 | FUMARATE AND NITRATE REDUCTION REGULATORY PROTEIN |
| 11 | 12 | RXN02910 | VV0135 | 30560 | 29856 | TRANSCRIPTIONAL ACTIVATOR PROTEIN LYSR |
| 13 | 14 | RXN02553 | VV0101 | 3454 | 4017 | CRYPTIC BETA-GLUCOSIDE BGL OPERON ANTITERMINATOR |
| 15 | 16 | RXS00686 | VV0005 | 30857 | 30054 | ACETATE OPERON REPRESSOR |
| 17 | 18 | RXS00774 | VV0103 | 22950 | 22297 | PHOSPHATE TRANSPORT SYSTEM REGULATORY PROTEIN |
| 19 | 20 | RXN02493 | VV0007 | 8481 | 9719 | PHOSPHATE REGULON SENSOR PROTEIN PHOR (EC 2.7.3.-) |
| 21 | 22 | F RXA02493 | GR00720 | 2931 | 4169 | regulatory gene for the phosphate regulon |
| 23 | 24 | RXN00631 | VV0135 | 18302 | 16848 | PHOSPHATE REGULON SENSOR PROTEIN PHOR (EC 2.7.3.-) |

Genes for signal transduction pathways, regulation of proteins and transcription

| | | | | | | |
|---|---|---|---|---|---|---|
| 25 | 26 | RXN00291 | VV0041 | 6431 | 4860 | SENSOR KINASE CITA (EC 2.7.3.-) |
| 27 | 28 | F RXA00291 | GR00047 | 2 | 1075 | SENSOR KINASE CITA (EC 2.7.3.-) |
| 29 | 30 | RXA00129 | GR00020 | 6205 | 4709 | SENSOR PROTEIN CPXA (EC 2.7.3.-) |
| 31 | 32 | RXN00651 | VV0109 | 8052 | 9383 | Hypothetical Sensor Histidine Kinase (EC 2.7.3.-) |
| 33 | 34 | F RXA00651 | GR00169 | 5450 | 4119 | SENSOR PROTEIN DEGS (EC 2.7.3.-) |
| 35 | 36 | RXA00006 | GR00001 | 6905 | 6471 | SENSOR PROTEIN FIXL (EC 2.7.3.-) |
| 37 | 38 | RXA01860 | GR00529 | 2368 | 1484 | SENSOR PROTEIN FIXL (EC 2.7.3.-) |
| 39 | 40 | RXA01861 | GR00529 | 4332 | 2368 | SENSOR PROTEIN FIXL (EC 2.7.3.-) |
| 41 | 42 | RXA02669 | GR00753 | 8893 | 10008 | SENSOR PROTEIN RESE (EC 2.7.3.-) |
| 43 | 44 | RXN01211 | VV0169 | 5106 | 6362 | SENSOR PROTEIN UHPB (EC 2.7.3.-) |
| 45 | 46 | F RXA01211 | GR00349 | 741 | 1535 | SENSOR PROTEIN UHPB (EC 2.7.3.-) |
| 47 | 48 | RXA01248 | GR00362 | 165 | 593 | SENSORY TRANSDUCTION PROTEIN REGX3 |
| 49 | 50 | RXA02668 | GR00753 | 8171 | 8893 | SENSORY TRANSDUCTION PROTEIN REGX3 |
| 51 | 52 | RXA02632 | GR00748 | 4863 | 4168 | putative two-component response regulator |
| | | | | | | [Mycobacterium tuberculosis] |
| 53 | 54 | RXA02631 | GR00748 | 4096 | 2732 | putative two-component sensor |
| | | | | | | [Mycobacterium tuberculosis] |
| 55 | 56 | RXA00609 | GR00161 | 226 | 891 | TWO COMPONENT RESPONSE REGULATOR |
| 57 | 58 | RXA00284 | GR00045 | 1318 | 2382 | ANKYRIN HOMOLOG PRECURSOR |
| 59 | 60 | RXA01827 | GR00516 | 6308 | 4902 | PROTEIN KINASE PKNA |
| 61 | 62 | RXA00813 | GR00219 | 1345 | 2475 | SECRETORY PROTEIN KINASE |
| 63 | 64 | RXA01826 | GR00516 | 4902 | 2965 | PUTATIVE SERINE/THREONINE-PROTEIN KINASE |
| | | | | | | PKNB (EC 2.7.1.-) |
| 65 | 66 | RXA02699 | GR00757 | 1357 | 3504 | PUTATIVE SERINE/THREONINE-PROTEIN KINASE |
| | | | | | | PKNB (EC 2.7.1.-) |
| 67 | 68 | RXA00319 | GR00056 | 505 | 80 | LOW MOLECULAR WEIGHT PHOSPHOTYROSINE PROTEIN |
| | | | | | | PHOSPHATASE (EC 3.1.3.48) |
| 69 | 70 | RXA01272 | GR00367 | 25049 | 24447 | PROBABLE LOW MOLECULAR WEIGHT PROTEIN-TYROSINE- |
| | | | | | | PHOSPHATASE EPSP (EC 3.1.3.48) |
| 71 | 72 | RXA01830 | GR00516 | 10410 | 9058 | PUTATIVE PHOSPHOPROTEIN PHOSPHATASE |
| 73 | 74 | RXA02747 | GR00764 | 277 | 2352 | [PROTEIN-PII] URIDYLYLTRANSFERASE |
| | | | | | | (EC 2.7.7.59) |
| 75 | 76 | RXA02210 | GR00648 | 1922 | 2485 | Hypothetical Transcriptional Regulator |
| 77 | 78 | RXA00221 | GR00032 | 20855 | 21073 | Hypothetical Transcriptional Regulator |
| 79 | 80 | RXN00551 | VV0079 | 30941 | 30471 | Hypothetical Transcriptional Regulator |
| 81 | 82 | F RXA00551 | GR00144 | 352 | 5 | Hypothetical Transcriptional Regulator |
| 83 | 84 | RXA01763 | GR00500 | 1987 | 1523 | Hypothetical Transcriptional Regulator |
| 85 | 86 | RXA02667 | GR00753 | 7863 | 7270 | Hypothetical Transcriptional Regulator |
| 87 | 88 | RXA00348 | GR00065 | 1507 | 1052 | Hypothetical Transcriptional Regulator |
| 89 | 90 | RXA01500 | GR00424 | 7551 | 7108 | Hypothetical Transcriptional Regulator |
| 91 | 92 | RXA01125 | GR00312 | 1800 | 1588 | Hypothetical Transcriptional Regulator |
| 93 | 94 | RXN00822 | VV0054 | 21521 | 20841 | Hypothetical Transcriptional Regulator |
| 95 | 96 | F RXA00822 | GR00221 | 3073 | 2393 | putative transcriptional regulator |
| 97 | 98 | RXN00849 | VV0067 | 4701 | 4381 | Hypothetical Transcriptional Regulator |
| 99 | 100 | F RXA00849 | GR00231 | 378 | 698 | possible transcriptional regulator |
| 101 | 102 | RXA02698 | GR00757 | 1143 | 775 | PUTATIVE TRANSCRIPTIONAL REGULATOR |
| 103 | 104 | RXA00350 | GR00066 | 1144 | 1470 | Hypothetical Transcription Inintiation Factor |
| 105 | 106 | RXA02830 | GR00817 | 3 | 497 | Helix-turn-helix domain-containing transcription |
| | | | | | | regulators |
| 107 | 108 | RXA00947 | GR00259 | 4164 | 3829 | Helix-turn-helix domain-containing transcriptional |
| | | | | | | regulators |
| 109 | 110 | RXA01836 | GR00517 | 4370 | 3666 | (AL021287) probable transcriptional regulator |
| | | | | | | [Mycobacterium tuberculosis] |
| 111 | 112 | RXA00292 | GR00047 | 1078 | 1731 | transcriptional regulator CriR |
| 113 | 114 | RXA00182 | GR00028 | 4247 | 7348 | POSSIBLE GLOBAL TRANSCRIPTION ACTIVATOR SNF2L |
| 115 | 116 | RXA02760 | GR00767 | 1154 | 201 | TRANSCRIPTION ANTITERMINATION PROTEIN NUSG |
| 117 | 118 | RXA02306 | GR00663 | 3214 | 2924 | TRANSCRIPTIONAL REGULATORY PROTEIN CITB |
| 119 | 120 | RXA00130 | GR00020 | 6985 | 6308 | TRANSCRIPTIONAL REGULATORY PROTEIN CPXR |
| 121 | 122 | RXA00885 | GR00242 | 11301 | 12326 | HEAT-INDUCIBLE TRANSCRIPTION REPRESSOR HRCA |
| 123 | 124 | RXA01418 | GR00415 | 776 | 531 | TRANSCRIPTIONAL REPRESSOR SMTB |
| 125 | 126 | RXA01759 | GR00498 | 4075 | 4836 | TRANSCRIPTIONAL REGULATORY PROTEIN GLTC |
| 127 | 128 | RXN00363 | VV0176 | 35684 | 34965 | Hypothetical Transcriptional Regulator |
| 129 | 130 | F RXA00363 | GR00073 | 1929 | 1246 | NTA OPERON TRANSCRIPTIONAL REGULATOR |
| 131 | 132 | RXA00516 | GR00131 | 592 | 1311 | NTA OPERON TRANSCRIPTIONAL REGULATOR |
| 133 | 134 | RXA01537 | GR00427 | 4829 | 4179 | NTA OPERON TRANSCRIPTIONAL REGULATOR |
| 135 | 136 | RXA02494 | GR00720 | 4169 | 4864 | KDP OPERON TRANSCRIPTIONAL REGULATORY PROTEIN KDPE |
| 137 | 138 | RXA00029 | GR00003 | 8910 | 8374 | PUTATIVE AGA OPERON TRANSCRIPTIONAL REPRESSOR |
| 139 | 140 | RXA00655 | GR00169 | 9049 | 8411 | putative regulatory protein |
| 141 | 142 | RXN03136 | VV0128 | 2692 | 278 | Hypothetical Transcriptional Regulator |
| 143 | 144 | F RXA00645 | GR00168 | 5831 | 8161 | PUTATIVE REGULATORY PROTEIN |
| 145 | 146 | RXA00593 | GR00158 | 2858 | 2511 | REGULATORY PROTEIN |
| 147 | 148 | RXA02724 | GR00760 | 870 | 4 | REGULATORY PROTEIN |
| 149 | 150 | RXA00494 | GR00123 | 768 | 472 | Hypothetical Regulatory Protein |
| 151 | 152 | RXN01368 | VV0091 | 3096 | 2785 | Hypothetical Regulatory Protein |
| 153 | 154 | F RXA01368 | GR00397 | 2334 | 2206 | Hypothetical Regulatory Protein |
| 155 | 156 | RXN00464 | VV0086 | 61883 | 62656 | REGULATORY PROTEIN SIR2 HOMOLOG |
| 157 | 158 | F RXA00464 | GR00117 | 75 | 332 | REGULATORY PROTEIN SIR2 HOMOLOG |
| 159 | 160 | RXA01655 | GR00460 | 1458 | 100 | PROBABLE RHIZOPINE CATABOLISM REGULATORY |
| | | | | | | PROTEIN MOCR |
| 161 | 162 | RXA00126 | GR00020 | 2269 | 1607 | PROBABLE SIGMA(54) MODULATION PROTEIN |
| 163 | 164 | RXN02450 | VV0107 | 10940 | 10386 | Hypothetical Transcriptional Regulator |
| 165 | 166 | F RXA02450 | GR00710 | 2533 | 3087 | POTENTIAL ACRAB OPERON REPRESSOR |
| 167 | 168 | RXA01898 | GR00544 | 1178 | 1870 | OPERON REGULATOR |
| 169 | 170 | RXA00004 | GR00001 | 4293 | 3823 | NITRILASE REGULATOR |
| 171 | 172 | RXA01001 | GR00284 | 516 | 833 | hex regulon repressor hexR |
| 173 | 174 | RXA01375 | GR00400 | 2560 | 1106 | FRNA |
| 175 | 176 | RXA02831 | GR00818 | 411 | 4 | EXTRAGENIC SUPPRESSOR PROTEIN SUHB |
| 177 | 178 | RXA01110 | GR00306 | 16399 | 16971 | TETRACYCLINE REPRESSOR PROTEIN CLASS C |
| 179 | 180 | RXA00253 | GR00038 | 1064 | 1801 | TETRACYCLINE REPRESSOR PROTEIN CLASS E |
| 181 | 182 | RXA01118 | GR00309 | 1787 | 2551 | regulator of the glyoxylate bypass |
| 183 | 184 | RXA01840 | GR00521 | 2 | 655 | ALIPHATIC AMIDASE EXPRESSION-REGULATING PROTEIN |
| 185 | 186 | RXA00400 | GR00087 | 1163 | 2041 | ALS OPERON REGULATORY PROTEIN |
| 187 | 188 | RXA02787 | GR00777 | 865 | 2241 | ACTIVATOR 1 41 KD SUBUNIT |
| 189 | 190 | RXA00287 | GR00046 | 1618 | 1145 | ADAPTIVE RESPONSE REGULATORY PROTEIN |
| 191 | 192 | RXA01687 | GR00470 | 3289 | 2219 | N-ACETYLGLUCOSAMINE REPRESSOR |
| 193 | 194 | RXA01935 | GR00555 | 8902 | 7739 | N-ACETYLGLUCOSAMINE REPRESSOR |
| 195 | 196 | RXN02270 | VV0020 | 13880 | 13260 | Hypothetical Transcriptional Regulator |
| 197 | 198 | F RXA02270 | GR00655 | 5005 | 4385 | member of the regulatory protein family SIR2 |
| 199 | 200 | RXA01241 | GR00359 | 739 | 1218 | LEXA REPRESSOR (EC 3.4.21.88) |
| 201 | 202 | RXA02127 | GR00637 | 2715 | 2062 | 6 ACTVA REGION GENES OF THE ACTINORHODIN |
| | | | | | | BIOSYNTHETIC GENE CLUSTER |
| 203 | 204 | RXA00583 | GR00156 | 10203 | 9466 | Uncharacterized ACR (translation?) |
| 205 | 206 | RXA00592 | GR00158 | 2121 | 1663 | Uncharacterized ACR (translation initiation |
| | | | | | | regulator?) |
| 207 | 208 | RXA00630 | GR00166 | 2 | 160 | (U67196) DNA-binding response regulator |
| | | | | | | [Thermotoga maritima] |
| 209 | 210 | F RXA00638 | GR00167 | 2862 | 3245 | DNA-binding response regulator |
| 211 | 212 | RXA00894 | GR00244 | 1926 | 799 | GTPASE-ACTIVATING PROTEIN 1 |
| 213 | 214 | RXA01450 | GR00419 | 1237 | 1800 | GTP-BINDING PROTEIN |
| 215 | 216 | RXA01451 | GR00419 | 1760 | 2326 | GTP-BINDING PROTEIN |
| 217 | 218 | RXA02376 | GR00689 | 3064 | 1562 | GTP-BINDING PROTEIN |
| 219 | 220 | RXA01065 | GR00298 | 2 | 583 | GTP-BINDING PROTEIN ERA |
| 221 | 222 | RXA02232 | GR00653 | 5286 | 6812 | GTP-BINDING PROTEIN HFLX |
| 223 | 224 | RXA00848 | GR00230 | 2125 | 1955 | GTP-BINDING PROTEIN LEPA |
| 225 | 226 | F RXA00839 | GR00228 | 372 | 4 | GTP-BINDING PROTEIN LEPA |
| 227 | 228 | F RXA00845 | GR00229 | 907 | 5 | GTP-BINDING PROTEIN LEPA |
| 229 | 230 | RXA02365 | GR00686 | 1568 | 1029 | GTP-BINDING PROTEIN LEPA |
| 231 | 232 | F RXA02392 | GR00696 | 1264 | 5 | GTP-BINDING PROTEIN LEPA |
| 233 | 234 | RXA01573 | GR00438 | 5744 | 3663 | 2′,3′-cyclic-nucleotide 2′- |
| | | | | | | posphodiesterase |
| 235 | 236 | RXN01445 | VV0089 | 14702 | 15694 | Hypothetical Sensor Histidine Kinase (EC 2.7.3.-) |
| 237 | 238 | RXN03143 | VV0139 | 1692 | 2822 | Hypothetical Sensor Histidine Kinase (EC 2.7.3.-) |
| 239 | 240 | RXN03071 | VV0040 | 6 | 344 | Hypothetical Sensor Protein |
| 241 | 242 | RXN03072 | VV0040 | 396 | 830 | Hypothetical Sensor Protein |
| 243 | 244 | RXN01773 | VV0015 | 1128 | 1604 | PROTEIN-TYROSINE PHOSPHATASE (EC 3.1.3.48) |
| 245 | 246 | RXN03090 | VV0054 | 5296 | 4076 | SENSORY COMPONENT OF SENSORY TRANSDUCTION HISTIDINE |
| | | | | | | KINASE (EC 2.7.3.-) |
| 247 | 248 | RXN00617 | VV0054 | 4053 | 3826 | SENSORY COMPONENT OF SENSORY TRANSDUCTION HISTIDINE |
| | | | | | | KINASE (EC 2.7.3.-) |
| 249 | 250 | RXN02990 | VV0073 | 1352 | 1948 | REGULATORY PROTEIN RECX |
| 251 | 252 | RXN03100 | VV0064 | 11866 | 11549 | ALIPHATIC AMIDASE EXPRESSION-REGULATING PROTEIN |
| 253 | 254 | RXN00031 | VV0127 | 54780 | 55181 | PHOSPHOHISTIDINE PHOSPHATASE SIXA (EC 3.1.3.-) |
| 255 | 256 | RXN02758 | VV0084 | 29359 | 28061 | PHOSPHOSERINE PHOSPHATASE (EC 3.1.3.3) |
| 257 | 258 | RXN00978 | VV0149 | 1360 | 1974 | NNRR |
| 259 | 260 | RXN01349 | VV0123 | 1531 | 755 | REGULATORY PROTEIN BETI |
| 261 | 262 | RXN00467 | VV0086 | 60275 | 60943 | IRON REPRESSOR |
| 263 | 264 | RXN02954 | VV0015 | 2693 | 3430 | Hypothetical Transcriptional Regulator |
| 265 | 266 | RXN03023 | VV0003 | 6100 | 5744 | Hypothetical Transcriptional Regulator |
| 267 | 268 | RXN03127 | VV0119 | 8276 | 7557 | Hypothetical Transcriptional Regulator |
| 269 | 270 | RXN03155 | VV0186 | 2 | 1669 | Hypothetical Transcriptional Regulator |
| 271 | 272 | RXN01315 | VV0082 | 13796 | 13146 | Hypothetical Transcription Regulator |
| 273 | 274 | RXN00035 | VV0020 | 24855 | 24499 | Hypothetical Transcriptional Regulator |
| 275 | 276 | RXN00049 | VV0174 | 11833 | 11147 | Hypothetical Transcriptional Regulator |
| 277 | 278 | RXN00486 | VV0086 | 22816 | 23724 | Hypothetical Transcriptional Regulator |
| 279 | 280 | RXN01081 | VV0084 | 33995 | 34744 | Hypothetical Transcriptional Regulator |
| 281 | 282 | RXN01160 | VV0151 | 4187 | 3213 | Hypothetical Transcriptional Regulator |
| 283 | 284 | RXN02097 | VV0298 | 184 | 3555 | Hypothetical Transcriptional Regulator |
| 285 | 286 | RXN02266 | VV0020 | 9528 | 10040 | Hypothetical Transcriptional Regulator |
| 287 | 288 | RXN02362 | VV0051 | 11237 | 7539 | Hypothetical Transcriptional Regulator |
| 289 | 290 | RXN02506 | VV0007 | 25030 | 24149 | Hypothetical Transcriptional Regulator |
| 291 | 292 | RXN02620 | VV0129 | 34206 | 33541 | Hypothetical Transcriptional Regulator |
| 293 | 294 | RXN00826 | VV0180 | 2580 | 3110 | Hypothetical Transcriptional Regulator |
| 295 | 296 | RXS00070 | VV0019 | 32468 | 32899 | FERRIC UPTAKE REGULATION PROTEIN |
| 297 | 298 | RXS00133 | VV0046 | 201 | 1013 | NITRATE/NITRITE RESPONSE REGULATOR PROTEIN NARP |
| 299 | 300 | RXS00144 | VV0134 | 20478 | 21053 | PYRIMIDINE OPERON REGULATORY PROTEIN PYRR |
| 301 | 302 | RXS00205 | VV0096 | 4885 | 3779 | CCPA PROTEIN |
| 303 | 304 | RXS00470 | VV0086 | 27401 | 28669 | NITRATE/NITRITE SENSOR PROTEIN NARX (EC 2.7.3.-) |
| 305 | 306 | RXS00471 | VV0086 | 28715 | 29404 | NITRATE/NITRITE RESPONSE REGULATOR PROTEIN NARL |
| 307 | 308 | RXS00481 | VV0086 | 43354 | 43938 | Hypothetical Protein |
| 309 | 310 | RXS00649 | VV0109 | 10679 | 10224 | Hypothetical Cytosolic Protein |
| 311 | 312 | RXS00650 | VV0109 | 9485 | 10120 | NITRATE/NITRITE RESPONSE REGULATOR PROTEIN NARP |
| 313 | 314 | RXS00657 | VV0109 | 2620 | 3522 | ACR Protein |
| 315 | 316 | RXS00719 | VV0232 | 7281 | 5653 | Hypothetical GTP-Binding Protein |
| 317 | 318 | RXS00738 | VV0254 | 3 | 365 | Hypothetical Cytosolic Protein |
| 319 | 320 | RXS01082 | VV0084 | 35406 | 34747 | IRON REPRESSOR |
| 321 | 322 | RXS01123 | VV0143 | 24824 | 25270 | Hypothetical Protein |
| 323 | 324 | RXS01189 | VV0169 | 6366 | 6974 | NITRATE/NITRITE RESPONSE REGULATOR PROTEIN NARP |
| 325 | 326 | RXS01242 | VV0068 | 17647 | 16871 | GLYCEROL-3-PHOSPHATE REGULON REPRESSOR |
| 327 | 328 | RXS01607 | VV0139 | 2822 | 3451 | NITRATE/NITRITE RESPONSE REGULATOR PROTEIN NARP |
| 329 | 330 | RXS01674 | | | | PROBABLE HYDROGEN PEROXIDE-INDUCIBLE GENES ACTIVATOR |
| 331 | 332 | RXS01872 | VV0248 | 2141 | 2968 | TRANSCRIPTIONAL REGULATORY PROTEIN |
| 333 | 334 | RXS02117 | VV0102 | 8076 | 8549 | Hypothetical Cytosolic Protein |
| 335 | 336 | RXS02288 | VV0127 | 51473 | 50628 | GLYCEROL-3-PHOSPHATE REGULON REPRESSOR |
| 337 | 338 | RXS02573 | VV0098 | 2475 | 2918 | ACR Protein |
| 339 | 340 | RXS02627 | VV0314 | 2981 | 2139 | DTXR/IRON-REGULATED LIPOPROTEIN PRECURSOR |
| 341 | 342 | RXS02691 | VV0098 | 55962 | 56768 | FATTY ACYL RESPONSIVE REGULATOR |
| 343 | 344 | RXS02730 | VV0145 | 7640 | 8677 | RIBOSE OPERON REPRESSOR |
| 345 | 346 | RXS02818 | VV0347 | 611 | 6 | Hypothetical Protein |
| 347 | 348 | RXS02911 | VV0135 | 24643 | 25101 | Hypothetical Cytosolic Protein |
| 349 | 350 | RXS03066 | VV0038 | 7298 | 6636 | Hypothetical Protein |
| 351 | 352 | RXS03208 | | | | DIPHTHERIA TOXIN REPRESSOR |
| 353 | 354 | F RXA00307 | GR00052 | 467 | 6 | DIPHTHERIA TOXIN REPRESSOR |
| 355 | 356 | RXS03219 | | | | LACI-FAMILY TRANSCRIPTION REGULATOR |
| 357 | 358 | F RXA02763 | GR00768 | 1603 | 2586 | MALTOSE OPERON TRANSCRIPTIONAL REPRESSOR |
| 359 | 360 | RXS03200 | | | | PROBABLE HYDROGEN PEROXIDE-INDUCIBLE GENES ACTIVATOR |

[0170] TABLE 2
GENES IDENTIFIED FROM GENBANK

| GenBank ™ | | | |
|---|---|---|---|
| Accession No. | Gene Name | Gene Function | Reference |
| A09073 | ppg | Phosphoenol pyruvate | Bachmann, B. et al. “DNA fragment coding |
| | | carboxylase | for phosphoenolpyruvat corboxylase, |
| | | | recombinant DNA carrying said fragment, |
| | | | strains carrying the recombinant DNA and |
| | | | method for producing L-amino acids using said |
| | | | strains,” Patent: EP 0358940-A 3 Mar. 21, 1990 |
| A45579, | | Threonine dehydratase | Moeckel, B. et al. “Production of L-isoleucine |
| A45581, | | | by means of recombinant micro-organisms with |
| A45583, | | | deregulated threonine dehydratase,” Patent: |
| A45585 | | | WO 9519442-A 5 Jul. 20, 1995 |
| A45587 | | | |
| AB003132 | murC; ftsQ; | | Kobayashi, M. et al. “Cloning, sequencing, |
| | ftsZ | | and characterization of the ftsZ gene from |
| | | | coryneform bacteria,” Biochem. Biophys. Res. |
| | | | Commun., 236(2): 383-388 (1997) |
| AB015023 | murC; ftsQ | | Wachi, M. et al. “A murC gene from Coryneform |
| | | | bacteria,” Appl. Microbiol. Biotechnol., |
| | | | 51(2): 223-228 (1999) |
| AB018530 | dtsR | | Kimura, E. et al. “Molecular cloning of a |
| | | | novel gene, dtsR, which rescues the |
| | | | detergent sensitivity of a mutant derived from |
| | | | Brevibacterium lactofermentum,” Biosci. |
| | | | Biotechnol. Biochem., 60(10): 1565-1570 (1996) |
| AB018531 | dtsR1; dtsR2 | | |
| AB020624 | murI | D-glutamate racemase | |
| AB023377 | tkt | transketolase | |
| AB024708 | gltB; gltD | Glutamine 2-oxoglutarate | |
| | | aminotransferase | |
| | | large and small subunits | |
| AB025424 | acn | aconitase | |
| AB027714 | rep | Replication protein | |
| AB027715 | rep; aad | Replication protein; | |
| | | aminoglycoside | |
| | | adenyltransferase | |
| AF005242 | argC | N-acetylglutamate-5- | |
| | | semialdehyde | |
| | | dehydrogenase | |
| AF005635 | glnA | Glutamine synthetase | |
| AF030405 | hisF | cyclase | |
| AF030520 | argG | Argininosuccinate synthetase | |
| AF031518 | argF | Ornithine carbamolytransferase | |
| AF036932 | aroD | 3-dehydroquinate dehydratase | |
| AF038548 | pyc | Pyruvate carboxylase | |
| AF038651 | dciAE; apt; | Dipeptide-binding protein; | Wehmeier, L. et al. “The role of the |
| | rel | adenine | Corynebacterium glutamicum rel gene in (p)ppGpp |
| | | phosphoribosyltransferase; | metabolism,” Microbiology, 144: 1853-1862 (1998) |
| | | GTP pyrophosphokinase | |
| AF041436 | argR | Arginine repressor | |
| AF045998 | impA | Inositol monophosphate | |
| | | phosphatase | |
| AF048764 | argH | Argininosuccinate lyase | |
| AF049897 | argC; argJ; | N-acetylglutamylphosphate | |
| | argB; argD; | reductase; ornithine | |
| | argF; argR; | acetyltransferase; N- | |
| | argG; argH | acetylglutamate kinase; | |
| | | acetylornithine | |
| | | transminase; ornithine | |
| | | carbamoyltransferase; | |
| | | arginine repressor; | |
| | | argininosuccinate synthase; | |
| | | argininosuccinate lyase | |
| AF050109 | inhA | Enoyl-acyl carrier protein | |
| | | reductase | |
| AF050166 | hisG | ATP phosphoribosyltransferase | |
| AF051846 | hisA | Phosphoribosylformimino-5- | |
| | | amino-1-phosphoribosyl-4- | |
| | | imidazolecarboxamide | |
| | | isomerase | |
| AF052652 | metA | Homoserine O-acetyltransferase | Park, S. et al. “Isolation and analysis of |
| | | | metA, a methionine biosynthetic gene encoding |
| | | | homoserine acetyltransferase in Corynebacterium |
| | | | glutamicum,” Mol. Cells., 8(3): 286-294 (1998) |
| AF053071 | aroB | Dehydroquinate synthetase | |
| AF060558 | hisH | Glutamine amidotransferase | |
| AF086704 | hisE | Phosphoribosyl-ATP- | |
| | | pyrophosphohydrolase | |
| AF114233 | aroA | 5-enolpyruvylshikimate | |
| | | 3-phosphate synthase | |
| AF116184 | panD | L-aspartate-alpha- | Dusch, N. et al. “Expression of the |
| | | decarboxylase precursor | Corynebacterium glutamicum panD gene encoding |
| | | | L-aspartate-alpha-decarboxylase leads to |
| | | | pantothenate overproduction in Escherichia coli,” |
| | | | Appl. Environ. Microbiol., 65(4)1530-1539 (1999) |
| AF124518 | aroD; aroE | 3-dehydroquinase; shikimate | |
| | | dehydrogenase | |
| AF124600 | aroC; aroK; | Chorismate synthase; shikimate kinase; 3- | |
| | aroB; pepQ | dehydroquinate synthase; | |
| | | putative cytoplasmic peptidase | |
| AF145897 | inhA | | |
| AF145898 | inhA | | |
| AJ001436 | ectP | Transport of ectoine, | Peter, H. et al. “Corynebacterium glutamicum |
| | | glycine betaine, proline | is equipped with four secondary carriers for |
| | | | compatible solutes: Identification, sequencing, |
| | | | and characterization of the proline/ectoine |
| | | | uptake system, ProP, and the ectoine/proline/ |
| | | | glycine betaine carrier, EctP,” J. Bacteriol., |
| | | | 180(22): 6005-6012 (1998) |
| AJ004934 | dapD | Tetrahydrodipicolinate | Wehrmann, A. et al. “Different modes of |
| | | succinylase (incomplete¹) | diaminopimelate synthesis and their role in cell |
| | | | wall integrity: A study with Corynebacterium |
| | | | glutamicum,” J. Bacteriol., 180(12): 3159-3165 (1998) |
| AJ007732 | ppc; secG; | Phosphoenolpyruvate-carboxylase; ?; high | |
| | amt; ocd; | affinity ammonium uptake protein; | |
| | soxA | putative ornithine- | |
| | | cyclodecarboxylase; sarcosine | |
| | | oxidase | |
| AJ010319 | ftsY, glnB, | Involved in cell division; | Jakoby, M. et al. “Nitrogen regulation in |
| | glnD; srp; | PII protein; uridylyltransferase | Corynebacterium glutamicum; Isolation of genes |
| | amtP | (uridylyl-removing enzmye); | involved in biochemical characterization of |
| | | signal recognition particle; | corresponding proteins,” FEMS Microbiol., |
| | | low affinity ammonium uptake | 173(2): 303-310 (1999) |
| | | protein | |
| AJ132968 | cat | Chloramphenicol aceteyl | |
| | | transferase | |
| AJ224946 | mqo | L-malate: quinone oxidoreductase | Molenaar, D. et al. “Biochemical and genetic |
| | | | characterization of the membrane-associated |
| | | | malate dehydrogenase (acceptor) from |
| | | | Corynebacterium glutamicum,” Eur. J. |
| | | | Biochem., 254(2): 395-403 (1998) |
| AJ238250 | ndh | NADH dehydrogenase | |
| AJ238703 | porA | Porin | Lichtinger, T. et al. “Biochemical and |
| | | | biophysical characterization of the cell |
| | | | wall porin of Corynebacterium glutamicum: |
| | | | The channel is formed by a low molecular mass |
| | | | polypeptide,” Biochemistry, 37(43): 15024-15032 (1998) |
| D17429 | | Transposable element IS31831 | Vertes, A. A. et al. “Isolation and |
| | | | characterization of IS31831, a transposable |
| | | | element from Corynebacterium glutamicum,” |
| | | | Mol. Microbiol., 11(4): 739-746 (1994) |
| D84102 | odhA | 2-oxoglutarate dehydrogenase | Usuda, Y. et al. “Molecular cloning of the |
| | | | Corynebacterium glutamicum (Brevibacterium |
| | | | lactofermentum AJ12036) odhA gene encoding a |
| | | | novel type of 2-oxoglutarate dehydrogenase,” |
| | | | Microbiology, 142: 3347-3354 (1996) |
| E01358 | hdh; hk | Homoserine dehydrogenase; | Katsumata, R. et al. “Production of |
| | | homoserine kinase | L-thereonine and L-isoleucine,” Patent: JP |
| | | | 1987232392-A 1 Oct. 12, 1987 |
| E01359 | | Upstream of the start codon | Katsumata, R. et al. “Production of |
| | | of homoserine kinase gene | L-thereonine and L-isoleucine,” Patent: JP |
| | | | 1987232392-A 2 Oct. 12, 1987 |
| E01375 | | Tryptophan operon | |
| E01376 | trpL; trpE | Leader peptide; anthranilate | Matsui, K. et al. “Tryptophan operon, |
| | | synthase | peptide and protein coded thereby, utilization |
| | | | of tryptophan operon gene expression and |
| | | | production of tryptophan,” Patent: |
| | | | JP 1987244382-A 1 Oct. 24, 1987 |
| E01377 | | Promoter and operator regions | Matsui, K. et al. “Tryptophan operon, |
| | | of tryptophan operon | peptide and protein coded thereby, utilization |
| | | | of tryptophan operon gene expression and |
| | | | production of tryptophan,” Patent: |
| | | | JP 1987244382-A 1 Oct. 24, 1987 |
| E03937 | | Biotin-synthase | Hatakeyama, K. et al. “DNA fragment |
| | | | containing gene capable of coding biotin |
| | | | synthetase and its utilization,” Patent: |
| | | | JP 1992278088-A 1 Oct. 02, 1992 |
| E04040 | | Diamino pelargonic acid | Kohama, K. et al. “Gene coding |
| | | aminotransferase | diaminopelargonic acid aminotransferase and |
| | | | desthiobiotin synthetase and its utilization,” |
| | | | Patent: JP 1992330284-A 1 Nov. 18, 1992 |
| E04041 | | Desthiobiotinsynthetase | Kohama, K. et al. “Gene coding |
| | | | diaminopelargonic acid aminotransferase and |
| | | | desthiobiotin synthetase and its utilization,” |
| | | | Patent: JP 1992330284-A 1 Nov. 18, 1992 |
| E04307 | | Flavum aspartase | Kurusu, Y. et al. “Gene DNA coding aspartase |
| | | | and utilization thereof,” Patent: |
| | | | JP 1993030977-A 1 Feb. 09, 1993 |
| E04376 | | Isocitric acid lyase | Katsumata, R. et al. “Gene manifestation |
| | | | controlling DNA,” Patent: |
| | | | JP 1993056782-A 3 Mar. 09, 1993 |
| E04377 | | Isocitric acid lyase N-terminal | Katsumata, R. et al. “Gene manifestation |
| | | fragment | controlling DNA,” Patent: |
| | | | JP 1993056782-A 3 Mar. 09, 1993 |
| E04484 | | Prephenate dehydratase | Sotouchi, N. et al. “Production of |
| | | | L-phenylalanine by fermentation,” Patent: |
| | | | JP 1993076352-A 2 Mar. 30, 1993 |
| E05108 | | Aspartokinase | Fugono, N. et al. “Gene DNA coding |
| | | | Aspartokinase and its use,” Patent: JP |
| | | | 1993184366-A 1 Jul. 27, 1993 |
| E05112 | | Dihydro-dipichorinate synthetase | Hatakeyama, K. et al. “Gene DNA coding |
| | | | dihydrodipicolinic acid synthetase and its use,” |
| | | | Patent: JP 1993184371-A 1 Jul. 27, 1993 |
| E05776 | | Diaminopimelic acid dehydrogenase | Kobayashi, M. et al. “Gene DNA coding |
| | | | Diaminopimelic acid dehydrogenase and its use,” |
| | | | Patent: JP 1993284970-A 1 Nov. 02, 1993 |
| E05779 | | Threonine synthase | Kohama, K. et al. “Gene DNA coding threonine |
| | | | synthase and its use,” Patent: |
| | | | JP 1993284972-A 1 Nov. 02, 1993 |
| E06110 | | Prephenate dehydratase | Kikuchi, T. et al. “Production of |
| | | | L-phenylalanine by fermentation method,” |
| | | | Patent: JP 1993344881-A 1 Dec. 27, 1993 |
| E06111 | | Mutated Prephenate dehydratase | Kikuchi, T. et al. “Production of |
| | | | L-phenylalanine by fermentation method,” |
| | | | Patent: JP 1993344881-A 1 Dec. 27, 1993 |
| E06146 | | Acetohydroxy acid synthetase | Inui, M. et al. “Gene capable of coding |
| | | | Acetohydroxy acid synthetase and its |
| | | | use,” Patent: JP 1993344893-A 1 Dec. 27, 1993 |
| E06825 | | Aspartokinase | Sugimoto, M. et al. “Mutant aspartokinase |
| | | | gene,” patent: JP 1994062866-A 1 Mar. 08, 1994 |
| E06826 | | Mutated aspartokinase alpha | Sugimoto, M. et al. “Mutant aspartokinase |
| | | subunit | gene,” patent: JP 1994062866-A 1 Mar. 08, 1994 |
| E06827 | | Mutated aspartokinase alpha | Sugimoto, M. et al. “Mutant aspartokinase |
| | | subunit | gene,” patent: JP 1994062866-A 1 Mar. 08, 1994 |
| E07701 | secY | | Honno, N. et al. “Gene DNA participating in |
| | | | integration of membraneous protein to membrane,” |
| | | | Patent: JP 1994169780-A 1 Jun. 21, 1994 |
| E08177 | | Aspartokinase | Sato, Y. et al. “Genetic DNA capable of coding |
| | | | Aspartokinase released from feedback inhibition |
| | | | and its utilization,” Patent: |
| | | | JP 1994261766-A 1 Sep. 20, 1994 |
| E08178, | | Feedback inhibition-released | Sato, Y. et al. “Genetic DNA capable of coding |
| E08179, | | Aspartokinase | Aspartokinase released from feedback inhibition |
| E08180, | | | and its utilization,” Patent: |
| E08181, | | | JP 1994261766-A 1 Sep. 20, 1994 |
| E08182 | | | |
| E08232 | | Acetohydroxy-acid | Inui, M. et al. “Gene DNA coding acetohydroxy |
| | | isomeroreductase | acid isomeroreductase,” |
| | | | Patent: JP 1994277067-A 1 Oct. 04, 1994 |
| E08234 | secE | | Asai, Y. et al. “Gene DNA coding for |
| | | | translocation machinery of protein,” |
| | | | Patent: JP 1994277073-A 1 Oct. 04, 1994 |
| E08643 | | FT aminotransferase and | Hatakeyama, K. et al. “DNA fragment having |
| | | desthiobiotin | promoter function in coryneform bacterium,” |
| | | synthetase promoter region | Patent: JP 1995031476-A 1 Feb. 03, 1995 |
| E08646 | | Biotin synthetase | Hatakeyama, K. et al. “DNA fragment having |
| | | | promoter function in coryneform bacterium,” |
| | | | Patent: JP 1995031476-A 1 Feb. 03, 1995 |
| E08649 | | Aspartase | Kohama, K. et al “DNA fragment having promoter |
| | | | function in coryneform bacterium,” Patent: |
| | | | JP 1995031478-A 1 Feb. 03, 1995 |
| E08900 | | Dihydrodipicolinate reductase | Madori, M. et al. “DNA fragment containing |
| | | | gene coding Dihydrodipicolinate acid reductase |
| | | | and utilization thereof,” Patent: |
| | | | JP 1995075578-A 1 Mar. 20, 1995 |
| E08901 | | Diaminopimelic acid decarboxylase | Madori, M. et al. “DNA fragment containing |
| | | | gene coding Diaminopimelic acid decarboxylase |
| | | | and utilization thereof,” Patent: |
| | | | JP 1995075579-A 1 Mar. 20, 1995 |
| E12594 | | Serine hydroxymethyltransferase | Hatakeyama, K. et al. “Production of |
| | | | L-trypophan,” Patent: JP 1997028391-A |
| | | | 1 Feb. 04, 1997 |
| E12760, | | transposase | Moriya, M. et al. “Amplification of gene |
| E12759, | | | using artificial transposon,” Patent: |
| E12758 | | | JP 1997070291-A Mar. 18, 1997 |
| E12764 | | Arginyl-tRNA synthetase; | Moriya, M. et al. “Amplification of gene |
| | | diaminopimelic | using artificial transposon,” Patent: |
| | | acid decarboxylase | JP 1997070291-A Mar. 18, 1997 |
| E12767 | | Dihydrodipicolinic acid | Moriya, M. et al. “Amplification of gene |
| | | synthetase | using artificial transposon,” Patent: |
| | | | JP 1997070291-A Mar. 18, 1997 |
| E12770 | | aspartokinase | Moriya, M. et al. “Amplification of gene |
| | | | using artificial transposon,” Patent: |
| | | | JP 1997070291-A Mar. 18, 1997 |
| E12773 | | Dihydrodipicolinic acid reductase | Moriya, M. et al. “Amplification of gene |
| | | | using artificial transposon,” Patent: |
| | | | JP 1997070291-A Mar. 18, 1997 |
| E13655 | | Glucose-6-phosphate dehydrogenase | Hatakeyama, K. et al. “Glucose-6-phosphate |
| | | | dehydrogenase and DNA capable of coding the |
| | | | same,” Patent: JP 1997224661-A 1 Sep. 02, 1997 |
| L01508 | IlvA | Threonine dehydratase | Moeckel, B. et al. “Functional and structural |
| | | | analysis of the threonine dehydratase of |
| | | | Corynebacterium glutamicum,” J. Bacteriol., |
| | | | 174: 8065-8072 (1992) |
| L07603 | EC 4.2.1.15 | 3-deoxy-D-arabinoheptulosonate-7- | Chen, C. et al. “The cloning and nucleotide |
| | | phosphate synthase | sequence of Corynebacterium glutamicum 3-deoxy-D- |
| | | | arabinoheptulosonate-7-phosphate synthase gene,” |
| | | | FEMS Microbiol. Lett., 107: 223-230 (1993) |
| L09232 | IlvB; ilvN; | Acetohydroxy acid synthase large subunit; | Keilhauer, C. et al. “Isoleucine synthesis in |
| | ilvC | Acetohydroxy acid synthase small subunit; | Corynebacterium glutamicum: molecular analysis of |
| | | Acetohydroxy acid | the ilvB-ilvN-ilvC operon,” J. Bacteriol., |
| | | isomeroreductase | 175(17): 5595-5603 (1993) |
| L18874 | PtsM | Phosphoenolpyruvate sugar | Fouet, A et al. “Bacillus subtilis sucrose- |
| | | phosphotransferase | specific enzyme II of the phosphotransferase |
| | | | system: expression in Escherichia coli and |
| | | | homology to enzymes II from enteric bacteria,” |
| | | | PNAS USA, 84(24): 8773-8777 (1987); Lee, J. K. et al. |
| | | | “Nucleotide sequence of the gene encoding the |
| | | | Corynebacterium glutamicum mannose enzyme II and |
| | | | analyses of the deduced protein sequence,” |
| | | | FEMS Microbiol. Lett., 119(1-2): 137-145 (1994) |
| L27123 | aceB | Malate synthase | Lee, H-S. et al. “Molecular characterization |
| | | | of aceB, a gene encoding malate synthase in |
| | | | Corynebacterium glutamicum,” J. Microbiol. |
| | | | Biotechnol., 4(4): 256-263 (1994) |
| L27126 | | Pyruvate kinase | Jetten, M. S. et al. “Structural and |
| | | | functional analysis of pyruvate kinase from |
| | | | Corynebacterium glutamicum,” Appl. Environ. |
| | | | Microbiol., 60(7): 2501-2507 (1994) |
| L28760 | aceA | Isocitrate lyase | |
| L35906 | dtxr | Diphtheria toxin repressor | Oguiza, J. A. et al. “Molecular cloning, DNA |
| | | | sequence analysis, and characterization of the |
| | | | Corynebacterium diphtheriae dtxR from Brevibacterium |
| | | | lactofermentum,” J. Bacteriol., 177(2): |
| | | | 465-467 (1995) |
| M13774 | | Prephenate dehydratase | Follettie, M. T. et al. “Molecular cloning and |
| | | | nucleotide sequence of the Corynebacterium |
| | | | glutamicum pheA gene,” J. Bacteriol., |
| | | | 167: 695-702 (1986) |
| M16175 | 5S rRNA | | Park, Y-H. et al. “Phylogenetic analysis of |
| | | | the coryneform bacteria by 56 rRNA sequences,” |
| | | | J. Bacteriol., 169: 1801-1806 (1987) |
| M16663 | trpE | Anthranilate synthase, 5′ end | Sano, K. et al. “Structure and function of the |
| | | | trp operon control regions of Brevibacterium |
| | | | lactofermentum, a glutamic-acid-producing |
| | | | bacterium,” Gene, 52: 191-200 (1987) |
| M16664 | trpA | Tryptophan synthase, 3′end | Sano, K. et al. “Structure and function of the |
| | | | trp operon control regions of Brevibacterium |
| | | | lactofermentum, a glutamic-acid-producing |
| | | | bacterium,” Gene, 52: 191-200 (1987) |
| M25819 | | Phosphoenolpyruvate carboxylase | O'Regan, M. et al. “Cloning and nucleotide |
| | | | sequence of the Phosphoenolpyruvate carboxylase- |
| | | | coding gene of Corynebacterium glutamicum |
| | | | ATCC13032,” Gene, 77(2): 237-251 (1989) |
| M85106 | | 23S rRNA gene insertion sequence | Roller, C. et al. “Gram-positive bacteria with |
| | | | a high DNA G + C content are characterized by a |
| | | | common insertion within their 23S rRNA genes,” |
| | | | J. Gen. Microbiol., 138: 1167-1175 (1992) |
| M85107, | | 23S rRNA gene insertion sequence | Roller, C. et al. “Gram-positive bacteria with |
| M85108 | | | a high DNA G + C content are characterized by a |
| | | | common insertion within their 23S rRNA genes,” |
| | | | J. Gen. Microbiol., 138: 1167-1175 (1992) |
| M89931 | aecD; brnQ; | Beta C—S lyase; branched-chain | Rossol, I. et al. “The Corynebacterium |
| | yhbw | amino acid uptake carrier; | glutamicum aecD gene encodes a C—S lyase with |
| | | hypothetical protein yhbw | alpha, beta-elimination activity that degrades |
| | | | aminoethylcysteine,” J. Bacteriol., 174(9): |
| | | | 2968-2977 (1992); Tauch, A. et al. “Isoleucine |
| | | | uptake in Corynebacterium glutamicum ATCC 13032 |
| | | | is directed by the brnQ gene product,”Arch. |
| | | | Microbiol, 169(4): 303-312 (1998) |
| S59299 | trp | Leader gene (promoter) | Herry, D. M. et al. “Cloning of the trp gene |
| | | | cluster from a tryptophan-hyperproducing strain |
| | | | of Corynebacterium glutamicum: identification of a |
| | | | mutation in the trp leader sequence,” Appl. |
| | | | Environ. Microbiol., 59(3): 791-799 (1993) |
| U11545 | trpD | Anthranilate | O'Gara, J. P. and Dunican, L. K. (1994) Complete |
| | | phosphoribosyltransferase | nucleotide sequence of the Corynebacterium |
| | | | glutamicum ATCC 21850 tpD gene.” Thesis, |
| | | | Microbiology Department, University College |
| | | | Galway, Ireland. |
| U13922 | cglIM; cglIR; | Putative type II 5-cytosoine | Schafer, A. et al. “Cloning and characterization |
| | clgIIR | methyltransferase; putative type II | of a DNA region encoding a stress-sensitive |
| | | restriction endonuclease; | restriction system from Corynebacterium glutamicum |
| | | putative type I or type III | ATCC 13032 and analysis of its role in intergeneric |
| | | restriction endonuclease | conjugation with Escherichia coli,” J. |
| | | | Bacteriol., 176(23): 7309-7319 (1994); Schafer, A. |
| | | | et al. “The Corynebacterium glutamicum cglIM gene |
| | | | encoding a 5-cytosine in an McrBC-deficient |
| | | | Escherichia coli strain,” Gene, 203(2): 95-101 (1997) |
| U14965 | recA | | |
| U31224 | ppx | | Ankri, S. et al. “Mutations in the |
| | | | Corynebacterium glutamicum proline biosynthetic |
| | | | pathway: A natural bypass of the proA step,” |
| | | | J. Bacteriol, 178(15): 4412-4419 (1996) |
| U31225 | proC | L-proline: NADP+ | Ankri, S. et al. “Mutations in the |
| | | 5-oxidoreductase | Corynebacterium glutamicum proline biosynthetic |
| | | | pathway: A natural bypass of the proA step,” |
| | | | J. Bacteriol, 178(15): 4412-4419 (1996) |
| U31230 | obg; proB; | ?; gamma glutamyl kinase; | Ankri, S. et al. “Mutations in the |
| | unkdh | similar to D-isomer specific | Corynebacterium glutamicum proline |
| | | 2-hydroxyacid dehydrogenases | biosynthetic pathway: A natural bypass of the |
| | | | proA step,” J. Bacteriol, 178(15): 4412-4419 (1996) |
| U31281 | bioB | Biotin synthase | Serebriiskii, I. G., “Two new members of the |
| | | | bio B superfamily: Cloning, sequencing and |
| | | | expression of bio B genes of Methylobacillus |
| | | | flagellatum and Corynebacterium glutamicum,” |
| | | | Gene, 175: 15-22 (1996) |
| U35023 | thtR; accBC | Thiosulfate sulfurtransferase; | Jager, W. et al. “A Corynebacterium glutamicum |
| | | acyl CoA carboxylase | gene encoding a two-domain protein similar to |
| | | | biotin carboxylases and biotin-carboxyl-carrier |
| | | | proteins,“ Arch. Microbiol., 166(2); 76-82 (1996) |
| U43535 | cmr | Multidrug resistance protein | Jager, W. et al. “A Corynebacterium glutamicum |
| | | | gene conferring multidrug resistance in the |
| | | | heterologous host Escherichia coli,” J. |
| | | | Bacteriol., 179(7): 2449-2451 (1997) |
| U43536 | clpB | Heat shock ATP-binding protein | |
| U53587 | aphA-3 | 3′5″-aminoglycoside | |
| | | phosphotransferase | |
| U89648 | | Corynebacterium glutamicum | |
| | | unidentified sequence involved | |
| | | in histidine biosynthesis, | |
| | | partial sequence | |
| X04960 | trpA; trpB; | Tryptophan operon | Matsui, K. et al. “Complete nucleotide and |
| | trpC; trpD; | | deduced amino acid sequences of the Brevibacterium |
| | trpE; trpG; | | lactofermentum tryptophan operon,” Nucleic |
| | trpL | | Acids Res., 14(24): 10113-10114 (1986) |
| X07563 | lys A | DAP decarboxylase (meso- | Yeh, P. et al. “Nucleic sequence of the lysA |
| | | diaminopimelate | gene of Corynebacterium glutamicum and possible |
| | | decarboxylase, EC 4.1.1.20) | mechanisms for modulation of its expression,” |
| | | | Mol. Gen. Genet., 212(1): 112-119 (1988) |
| X14234 | EC 4.1.1.31 | Phosphoenolpyruvate carboxylase | Eikmanns, B. J. et al. “The Phosphoenolpyruvate |
| | | | carboxylase gene of Corynebacterium glutamicum: |
| | | | Molecular cloning, nucleotide sequence, and |
| | | | expression,” Mol. Gen. Genet., 218(2): 330-339 |
| | | | (1989); Lepiniec, L. et al. “Sorghum |
| | | | Phosphoenolpyruvate carboxylase gene family: |
| | | | structure, function and molecular evolution,” |
| | | | Plant. Mol. Biol., 21 (3): 487-502 (1993) |
| X17313 | fda | Fructose-bisphosphate aldolase | Von der Osten, C. H. et al. “Molecular cloning, |
| | | | nucleotide sequence and fine-structural analysis |
| | | | of the Corynebacterium glutamicum fda gene: |
| | | | structural comparison of C. glutamicum fructose- |
| | | | 1,6-biphosphate aldolase to class I and |
| | | | class II aldolases,” Mol. Microbiol., |
| X53993 | dapA | L-2,3-dihydrodipicolinate | Bonnassie, S. et al. “Nucleic sequence of the |
| | | synthetase (EC 4.2.1.52) | dapA gene from Corynebacterium glutamicum,” |
| | | | Nucleic Acids Res., 18(21): 6421 (1990) |
| X54223 | | AttB-related site | Cianciotto, N. et al. “DNA sequence homology |
| | | | between att B-related sites of Corynebacterium |
| | | | diphtheriae, Corynebacterium ulcerans, |
| | | | Corynebacterium glutamicum, and the attP site |
| | | | of lambdacorynephage,” FEMS. Microbiol, |
| | | | Lett., 66: 299-302 (1990) |
| X54740 | argS; lysA | Arginyl-tRNA synthetase; | Marcel, T. et al. “Nucleotide sequence and |
| | | Diaminopimelate decarboxylase | organization of the upstream region |
| | | | of the Corynebacterium glutamicum lysA gene,” |
| | | | Mol. Microbiol., 4(11): 1819-1830 (1990) |
| X55994 | trpL; trpE | Putative leader peptide; | Heery, D. M. et al. “Nucleotide sequence of |
| | | anthranilate synthase component 1 | the Corynebacterium glutamicum trpE gene,” |
| | | | Nucleic Acids Res., 18(23): 7138 (1990) |
| X56037 | thrC | Threonine synthase | Han, K. S. et al. “The molecular structure of |
| | | | the Corynebacterium glutamicum threonine synthase |
| | | | gene,” Mol. Microbiol., 4(10): 1693-1702 (1990) |
| X56075 | attB-related | Attachment site | Cianciotto, N. et al. “DNA sequence homology |
| | site | | between att B-related sites of Corynebacterium |
| | | | diphtheriae, Corynebacterium ulcerans, |
| | | | Corynebacterium glutamicum, and the attP site of |
| | | | lambdacorynephage,” FEMS. Microbiol, |
| | | | Lett., 66: 299-302 (1990) |
| X57226 | lysC-alpha; | Aspartokinase-alpha subunit; | Kalinowski, J. et al. “Genetic and biochemical |
| | lysC-beta; | Aspartokinase-beta subunit; | analysis of the Aspartokinase from Corynebacterium |
| | asd | aspartate beta | glutamicum,” Mol. Microbiol., 5(5): 1197-1204 |
| | | semialdehyde dehydrogenase | (1991); Kalinowski, J. et al. “Aspartokinase |
| | | | genes lysC alpha and lysC beta overlap and are |
| | | | adjacent to the aspertate beta-semialdehyde |
| | | | dehydrogenase gene asd in Corynebacterium |
| | | | glutamicum,” Mol. Gen. Genet., |
| | | | 224(3): 317-324 (1990) |
| X59403 | gap; pgk; tpi | Glyceraldehyde-3-phosphate; | Eikmanns, B. J. “Identification, sequence |
| | | phosphoglycerate kinase; | analysis, and expression of a Corynebacterium |
| | | triosephosphate isomerase | glutamicum gene cluster encoding the three |
| | | | glycolytic enzymes glyceraldehyde-3-phosphate |
| | | | dehydrogenase, 3-phosphoglycerate |
| | | | kinase, and triosephosphate isomeras,” |
| | | | J. Bacteriol., 174(19): 6076-6086 (1992) |
| X59404 | gdh | Glutamate dehydrogenase | Bormann, E. R. et al. “Molecular analysis of |
| | | | the Corynebacterium glutamicum gdh gene encoding |
| | | | glutamate dehydrogenase,” Mol. Microbiol., |
| | | | 6(3): 317-326 (1992) |
| X60312 | lysl | L-lysine permease | Seep-Feldhaus, A. H. et al. “Molecular |
| | | | analysis of the Corynebacterium glutamicum lysl |
| | | | gene involved in lysine uptake,” Mol. |
| | | | Microbiol., 5(12): 2995-3005 (1991) |
| X66078 | cop1 | Ps1 protein | Joliff, G. et al. “Cloning and nucleotide |
| | | | sequence of the csp 1 gene encoding PS1, one of |
| | | | the two major secreted proteins of |
| | | | Corynebacterium glutamicum: The deduced N-terminal |
| | | | region of PS1 is similar to the Mycobacterium |
| | | | antigen 85 complex,” Mol. Microbiol., |
| | | | 6(16): 2349-2362 (1992) |
| X66112 | glt | Citrate synthase | Eikmanns, B. J. et al. “Cloning sequence, |
| | | | expression and transcriptional analysis of the |
| | | | Corynebacterium glutamicum gltA gene encoding |
| | | | citrate synthase,” Microbiol., |
| | | | 140: 1817-1828 (1994) |
| X67737 | dapB | Dihydrodipicolinate reductase | |
| X69103 | csp2 | Surface layer protein PS2 | Peyret, J. L. et al. “Characterization of the |
| | | | cspB gene encoding PS2, an ordered surface-layer |
| | | | protein in Corynebacterium glutamicum,” Mol. |
| | | | Microbiol., 9(1): 97-109 (1993) |
| X69104 | | IS3 related insertion element | Bonamy, C. et al. “Identification of IS1206, |
| | | | a Corynebacterium glutamicum IS3-related insertion |
| | | | sequence and phylogenetic analysis,” Mol. |
| | | | Microbiol., 14(3): 571-581 (1994) |
| X70959 | leuA | Isopropylmalate synthase | Patek, M. et al. “Leucine synthesis in |
| | | | Corynebacterium glutamicum: enzyme activities, |
| | | | structure of leuA, and effect of leuA inactivation |
| | | | on lysine synthesis,” Appl. Environ. |
| | | | Microbiol., 60(1): 133-140 (1994) |
| X71489 | icd | Isocitrate dehydrogenase | Eikmanns, B. J. et al. “Cloning sequence |
| | | (NADP+) | analysis, expression, and inactivation of the |
| | | | Corynebacterium glutamicum icd gene encoding |
| | | | isocitrate dehydrogenase and biochemical |
| | | | characterization of the enzyme,” J. Bacteriol., |
| | | | 177(3): 774-782 (1995) |
| X72855 | GDHA | Glutamate dehydrogenase (NADP+) | |
| X75083, | mtrA | 5-methyltryptophan resistance | Heery, D. M. et al. “A sequence from a |
| X70584 | | | tryptophan-hyperproducing strain of |
| | | | Corynebacterium glutamicum encoding resistance |
| | | | to 5-methyltryptophan,” Biochem. Biophys. |
| | | | Res. Commun., 201(3): 1255-1262 (1994) |
| X75085 | recA | | Fitzpatrick, R. et al. “Construction and |
| | | | characterization of recA mutant strains |
| | | | of Corynebacterium glutamicum and |
| | | | Brevibacterium lactofermentum,” Appl. |
| | | | Microbioil. Biotechnol., 42(4): 575-580 (1994) |
| X75504 | aceA; thiX | Partial Isocitrate lyase; ? | Reinscheid, D. J. et al. “Characterization of |
| | | | the isocitrate lyase gene from |
| | | | Corynebacterium glutamicum and biochemical |
| | | | analysis of the enzyme,” J. |
| | | | Bacterial., 176(12): 3474-3483 (1994) |
| X76875 | | ATPase beta-subunit | Ludwig, W. et al. “Phylogenetic relationships |
| | | | of bacteria based on comparative sequence analysis |
| | | | of elongation factor Tu and ATP-synthase beta- |
| | | | subunit genes,” Antonie Van Leeuwenhoek, |
| | | | 64: 285-305 (1993) |
| X77034 | tuf | Elongation factor Tu | Ludwig, W. et al. “Phylogenetic relationships |
| | | | of bacteria based on comparative sequence analysis |
| | | | of elongation factor Tu and ATP-synthase beta- |
| | | | subunit genes,” Antonie Van Leeuwenhoek, |
| | | | 64: 285-305 (1993) |
| X77384 | recA | | Billman-Jacobe, H. “Nucleotide sequence of a |
| | | | recA gene from Corynebacterium glutamicum,” |
| | | | DNA Seq., 4(6): 403-404 (1994) |
| X78491 | aceB | Malate synthase | Reinscheid, D. J. et al. “Malate synthase from |
| | | | Corynebacterium glutamicum pta-ack operon |
| | | | encoding phosphotransacetylase: sequence |
| | | | analysis,” Microbiology, 140: 3099-3108 (1994) |
| X80629 | 16S rDNA | 16S ribosomal RNA | Rainey, F. A. et al. “Phylogenetic analysis of |
| | | | the genera Rhodococcus and Norcardia and evidence |
| | | | for the evolutionary origin of the genus |
| | | | Norcardia from within the radiation of |
| | | | Rhodococcus species,” Microbiol, 141: 523-528 |
| | | | (1995) |
| X81191 | gluA; gluB; | Glutamate uptake system | Kronemeyer, W. et al. “Structure of the |
| | gluC; gluD | | gluABCD cluster encoding the glutamate uptake |
| | | | system of Corynebacterium glutamicum,” J. |
| | | | Bacteriol., 177(5): 1152-1158 (1995) |
| X81379 | dapE | Succinyldiaminopimelate | Wehrmann, A. et al. “Analysis of different |
| | | desuccinylase | DNA fragments of Corynebacterium glutamicum |
| | | | complementing dapE of Escherichia coli,” |
| | | | Microbiology, 40: 3349-56 (1994) |
| X82061 | 16S rDNA | 16S ribosomal RNA | Ruimy, R. et al. “Phylogeny of the genus |
| | | | Corynebacterium deduced from analyses of small- |
| | | | subunit ribosomal DNA sequences,” Int. J. |
| | | | Syst. Bacteriol., 45(4): 740-746 (1995) |
| X82928 | asd; lysC | Aspartate-semialdehyde | Serebrijski, I. et al. “Multicopy suppression |
| | | dehydrogenase; ? | by asd gene and osmotic stress-dependent |
| | | | complementation by heterologous proA in proA |
| | | | mutants,” J. Bacteriol., 177(24): 7255-7260 (1995) |
| X82929 | proA | Gamma-glutamyl phosphate reductase | Serebrijski, I. et al. “Multicopy suppression |
| | | | by asd gene and osmotic stress-dependent |
| | | | complementation by heterologous proA in proA |
| | | | mutants,” J. Bacteriol., 177(24): 7255-7260 (1995) |
| X84257 | 16S rDNA | 16S ribosomal RNA | Pascual, C. et al. “Phylogenetic analysis of |
| | | | the genus Corynebacterium based on 16S rRNA gene |
| | | | sequences,” Int. J. Syst. Bacteriol., |
| | | | 45(4): 724-728 (1995) |
| X85965 | aroP; dapE | Aromatic amino acid permease; ? | Wehrmann, A. et al. “Functional analysis of |
| | | | sequences adjacent to dapE of |
| | | | Corynebacterium glutamicum proline reveals the |
| | | | presence of aroP, which encodes the aromatic |
| | | | amino acid transporter,” J. Bacteriol., |
| | | | 177(20): 5991-5993 (1995) |
| X86157 | argB; argC; | Acetylglutamate kinase; | Sakanyan, V. et al. “Genes and enzymes of |
| | argD; argF; | N-acetyl-gamma-glutamyl-phosphate | the acetyl cycle of arginine biosynthesis in |
| | argJ | reductase; acetylornithine | Corynebacterium glutamicum: enzyme evolution in |
| | | aminotransferase; ornithine | the early steps of the arginine pathway,” |
| | | carbamoyltransferase; glutamate N- | Microbiology, 142: 99-108 (1996) |
| | | acetyltransferase | |
| X89084 | pta; ackA | Phosphate acetyltransferase; | Reinscheid, D. J. et al. “Cloning, sequence |
| | | acetate kinase | analysis, expression and inactivation of the |
| | | | Corynebacterium glutamicum pta-ack operon encoding |
| | | | phosphotransacetylase and acetate kinase,” |
| | | | Microbiology, 145: 503-513 (1999) |
| X89850 | attB | Attachment site | Le Marrec, C. et al. “Genetic characterization of site-specific integration |
| | | | functions of phi AAU2 infecting ”Arthrobacter |
| | | | aureus C70,” J. Bacteriol., |
| | | | 178(7): 1996-2004 (1996) |
| X90356 | | Promoter fragment F1 | Patek, M. et al. “Promoters from |
| | | | Corynebacterium glutamicum: cloning, molecular |
| | | | analysis and search for a consensus motif,” |
| | | | Microbiology, 142: 1297-1309 (1996) |
| X90357 | | Promoter fragment F2 | Patek, M. et al. “Promoters from |
| | | | Corynebacterium glutamicum: cloning, molecular |
| | | | analysis and search for a consensus motif,” |
| | | | Microbiology, 142: 1297-1309 (1996) |
| X90358 | | Promoter fragment F10 | Patek, M. et al. “Promoters from |
| | | | Corynebacterium glutamicum: cloning, molecular |
| | | | analysis and search for a consensus motif,” |
| | | | Microbiology, 142: 1297-1309 (1996) |
| X90359 | | Promoter fragment F13 | Patek, M. et al. “Promoters from |
| | | | Corynebacterium glutamicum: cloning, molecular |
| | | | analysis and search for a consensus motif,” |
| | | | Microbiology, 142: 1297-1309 (1996) |
| X90360 | | Promoter fragment F22 | Patek, M. et al. “Promoters from |
| | | | Corynebacterium glutamicum: cloning, molecular |
| | | | analysis and search for a consensus motif,” |
| | | | Microbiology, 142: 1297-1309 (1996) |
| X90361 | | Promoter fragment F34 | Patek, M. et al. “Promoters from |
| | | | Corynebacterium glutamicum: cloning, molecular |
| | | | analysis and search for a consensus motif,” |
| | | | Microbiology, 142: 1297-1309 (1996) |
| X90362 | | Promoter fragment F37 | Patek, M. et al. “Promoters from |
| | | | Corynebacterium glutamicum: cloning, molecular |
| | | | analysis and search for a consensus motif,” |
| | | | Microbiology, 142: 1297-1309 (1996) |
| X90363 | | Promoter fragment F45 | Patek, M. et al. “Promoters from |
| | | | Corynebacterium glutamicum: cloning, molecular |
| | | | analysis and search for a consensus motif,” |
| | | | Microbiology, 142: 1297-1309 (1996) |
| X90364 | | Promoter fragment F64 | Patek, M. et al. “Promoters from |
| | | | Corynebacterium glutamicum: cloning, molecular |
| | | | analysis and search for a consensus motif,” |
| | | | Microbiology, 142: 1297-1309 (1996) |
| X90365 | | Promoter fragment F75 | Patek, M. et al. “Promoters from |
| | | | Corynebacterium glutamicum: cloning, molecular |
| | | | analysis and search for a consensus motif,” |
| | | | Microbiology, 142: 1297-1309 (1996) |
| X90366 | | Promoter fragment PF101 | Patek, M. et al. “Promoters from |
| | | | Corynebacterium glutamicum: cloning, molecular |
| | | | analysis and search for a consensus motif,” |
| | | | Microbiology, 142: 1297-1309 (1996) |
| X90367 | | Promoter fragment PF104 | Patek, M. et al. “Promoters from |
| | | | Corynebacterium glutamicum: cloning, molecular |
| | | | analysis and search for a consensus motif,” |
| | | | Microbiology, 142: 1297-1309 (1996) |
| X90368 | | Promoter fragment PF109 | Patek, M. et al. “Promoters from |
| | | | Corynebacterium glutamicum: cloning, molecular |
| | | | analysis and search for a consensus motif,” |
| | | | Microbiology, 142: 1297-1309 (1996) |
| X93513 | amt | Ammonium transport system | Siewe, R. M. et al. “Functional and genetic |
| | | | characterization of the (methyl) ammonium |
| | | | uptake carrier of Corynebacterium glutamicum,” |
| | | | J. Biol. Chem., 271(10): 5398-5403 (1996) |
| X93514 | betP | Glycine betaine transport system | Peter, H. et al. “Isolation, characterization, |
| | | | and expression of the Corynebacterium glutamicum |
| | | | betP gene, encoding the transport system for the |
| | | | compatible solute glycine betaine,” |
| | | | J. Bacteriol., 178(17): 5229-5234 (1996) |
| X95649 | orf4 | | Patek, M. et al. “Identification and |
| | | | transcriptional analysis of the dapB-ORF2- |
| | | | dapA-ORF4 operon of Corynebacterium glutamicum, |
| | | | encoding two enzymes involved in L-lysine |
| | | | synthesis,” Biotechnol. Lett., |
| | | | 19: 1113-1117 (1997) |
| X96471 | lysE; lysG | Lysine exporter protein; | Vrljic, M. et al. “A new type of transporter |
| | | Lysine export regulator protein | with a new type of cellular function: L-lysine |
| | | | export from Corynebacterium glutamicum,” Mol. |
| | | | Microbiol., 22(5): 815-826 (1996) |
| X96580 | panB; panC; | 3-methyl-2-oxobutanoate | Sahm, H. et al. “D-pantothenate synthesis in |
| | xylB | hydroxymethyltransferase; | Corynebacterium glutamicum and use of panBC and |
| | | pantoate-beta-alanine ligase; | genes encoding L-valine synthesis for |
| | | xylulokinase | D-pantothenate overproduction,” Appl. Environ. |
| | | | Microbiol., 65(5): 1973-1979 (1999) |
| X96962 | | Insertion sequence IS 1207 | |
| | | and transposase | |
| X99289 | | Elongation factor P | Ramos, A. et al. “Cloning, sequencing and |
| | | | expression of the gene encoding elongation factor |
| | | | P in the amino-acid producer Brevibacterium |
| | | | lactofermentum (Corynebacterium glutamicum ATCC |
| | | | 13869),” Gene, 198: 217-222 (1997) |
| Y00140 | thrB | Homoserine kinase | Mateos, L. M. et al. “Nucleotide sequence of |
| | | | the homoserine kinase (thrB) gene of the |
| | | | Brevibacterium lactofermentum,” Nucleic Acids |
| | | | Res., 15(9): 3922 (1987) |
| Y00151 | ddh | Meso-diaminopimelate D- | Ishino, S. et al. “Nucleotide sequence of the |
| | | dehydrogenase (EC 1.4.1.16) | meso-diaminopimelate D-dehydrogenase gene from |
| | | | Corynebacterium glutamicum,” Nucleic Acids |
| | | | Res., 15(9): 3917(1987) |
| Y00476 | thrA | Homoserine dehydrogenase | Mateos, L. M. et al. “Nucleotide sequence of |
| | | | the homoserine dehydrogenase (thrA) gene of the |
| | | | Brevibacterium lactofermentum,” Nucleic Acids |
| | | | Res., 15(24): 10598 (1987) |
| Y00546 | hom; thrB | Homoserine dehydrogenase; | Peoples, O.P. et al. “Nucleotide sequence and |
| | | homoserine kinase | fine structural analysis of the |
| | | | Corynebacterium glutamicum hom-thrB operon,” |
| | | | Mol. Microbiol., 2(l): 63-72 (1988) |
| Y08964 | murC; ftsQ/ | UPD-N-acetylmuramate-alanine | Honrubia, M. P. et al. “Identification, |
| | divD; ftsZ | ligase; division initiation | characterization, and chromosomal organization of |
| | | protein or cell division | the ftsZ gene from Brevibacterium lactofermentum,” |
| | | protein; cell division protein | Mol. Gen. Genet., 259(1): 97-104 (1998) |
| Y09163 | putP | High affinity proline transport | Peter, H. et al. “Isolation of the putP gene |
| | | system | of Corynebacterium glutamicum proline and |
| | | | characterization of a low-affinity uptake system |
| | | | for compatible solutes” Arch. Microbiol., |
| | | | 168(2): 143-151 (1997) |
| Y09548 | pyc | Pyruvate carboxylase | Peters-Wendisch, P. G. et al. “Pyruvate |
| | | | carboxylase from Corynebacterium glutamicum: |
| | | | characterization, expression and inactivation of |
| | | | the pyc gene,” Microbiology, 144: 915-927 (1998) |
| Y09578 | ieuB | 3-isopropylmalate dehydrogenase | Patek, M. et al. “Analysis of the leuB gene |
| | | | from Corynebacterium glutamicum,” Appl. |
| | | | Microbiol. Biotechnol, 50(1): 42-47 (1998) |
| Y12472 | | Attachment site bacteriophage | Moreau, S. et al. “Site-specific integration |
| | | Phi-16 | of corynephage Phi-16: The construction of an |
| | | | integration vector” Microbiol., |
| | | | 145: 539-548 (1999) |
| Y12537 | proP | Proline/ectoine uptake system | Peter, H. et al. “Corynebacterium glutamicum |
| | | protein | is equipped with four secondary carriers for |
| | | | compatible solutes: Identification, sequencing, |
| | | | and characterization of the proline/ectoine |
| | | | uptake system, ProP, and the ectoine/proline/ |
| | | | glycine betaine carrier, EctP,” J. Bacteriol., |
| | | | 180(22): 6005-6012 (1998) |
| Y13221 | glnA | Glutamine synthetase I | Jakoby, M. et al. “Isolation of |
| | | | Corynebacterium glutamicum glnA gene |
| | | | encoding glutamine synthetase I,” FEMS |
| | | | Microbiol. Lett., 154(1): 81-88 (1997) |
| Y16642 | lpd | Dihydrolipoamide dehydrogenase | |
| Y18059 | | Attachment site Corynephage 304L | Moreau, S. et al. “Analysis of the integration |
| | | | functions of &phi; 304L: An integrase module |
| | | | among corynephages,” Virology, 255(1): 150-159 |
| | | | (1999) |
| Z21501 | argS; lysA | Arginyl-tRNA synthetase; | Oguiza, J. A. et al. “A gene encoding |
| | | diaminopimelate | arginyl-tRNA synthetase is located in the |
| | | decarboxylase (partial) | upstream region of the lysA gene in |
| | | | Brevibacterium lactofermentum: Regulation of |
| | | | argS-lysA cluster expression by arginine,” J. |
| | | | Bacteriol., 175(22): 7356-7362 (1993) |
| Z21502 | dapA; dapB | Dihydrodipicolinate synthase; | Pisabarro, A. et al. “A cluster of three genes |
| | | dihydrodipicolinate reductase | (dapA, orf2, and dapB) of |
| | | | Brevibacterium lactofermentum encodes |
| | | | dihydrodipicolinate reductase, and a third |
| | | | polypeptide of unknown function,” J. |
| | | | Bacterial., 175(9): 2743-2749 (1993) |
| Z29563 | thrC | Threonine synthase | Malumbres, M. et al. “Analysis and expression |
| | | | of the thrC gene of the encoded threonine |
| | | | synthase,” Appl. Environ. Microbiol., |
| | | | 60(7)2209-2219 (1994) |
| Z46753 | 16S rDNA | Gene for 16S ribosomal RNA | |
| Z49822 | sigA | SigA sigma factor | Oguiza, J. A. et al “Multiple sigma factor |
| | | | genes in Brevibacterium lactofermentum: |
| | | | Characterization of sigA and sigB,” J. |
| | | | Bacteriol., 178(2): 550-553 (1996) |
| Z49823 | galE; dtxR | Catalytic activity UDP-galactose | Oguiza, J. A. et al “The galE gene encoding the |
| | | 4-epimerase; diphtheria toxin | UDP-galactose 4-epimerase of Brevibacterium |
| | | regulatory protein | lactofermentumis coupled transcriptionally to |
| | | | the dmdR gene,” Gene, 177: 103-107 (1996) |
| Z49824 | orf1; sigB | ?; SigB sigma factor | Oguiza, J. A. et al “Multiple sigma factor |
| | | | genes in Brevibacterium lactofermentum: |
| | | | Characterization of sigA and sigB,” J. |
| | | | Bacterial., 178(2): 550-553(1996) |
| Z66534 | | Transposase | Correia, A. et al. “Cloning and |
| | | | characterization of an IS-like element present |
| | | | in the genome of Brevibacterium lactofermentum |
| | | | ATCC 13869,” Gene, 170(1): 91-94 (1996) |

¹A sequence for this gene was published in the indicated reference. However, the sequence obtained by the inventors of the present application is significantly longer than the published version. It is believed that the published version relied on an incorrect start codon, and thus represents only a fragment of the actual coding region.

[0171] TABLE 3
Corynebacterium and Brevibacterium Strains Which May be Used in the Practice of the Invention

| Genus | species | ATCC | FERM | NRRL | CECT | NCIMB | CBS | NCTC | DSMZ |
|---|---|---|---|---|---|---|---|---|---|
| Brevibacterium | ammoniagenes | 21054 | | | | | | | |
| Brevibacterium | ammoniagenes | 19350 | | | | | | | |
| Brevibacterium | ammoniagenes | 19351 | | | | | | | |
| Brevibacterium | ammoniagenes | 19352 | | | | | | | |
| Brevibacterium | ammoniagenes | 19353 | | | | | | | |
| Brevibacterium | ammoniagenes | 19354 | | | | | | | |
| Brevibacterium | ammoniagenes | 19355 | | | | | | | |
| Brevibacterium | ammoniagenes | 19356 | | | | | | | |
| Brevibacterium | ammoniagenes | 21055 | | | | | | | |
| Brevibacterium | ammoniagenes | 21077 | | | | | | | |
| Brevibacterium | ammoniagenes | 21553 | | | | | | | |
| Brevibacterium | ammoniagenes | 21580 | | | | | | | |
| Brevibacterium | ammoniagenes | 39101 | | | | | | | |
| Brevibacterium | butanicum | 21196 | | | | | | | |
| Brevibacterium | divaricatum | 21792 | P928 | | | | | | |
| Brevibacterium | flavum | 21474 | | | | | | | |
| Brevibacterium | flavum | 21129 | | | | | | | |
| Brevibacterium | flavum | 21518 | | | | | | | |
| Brevibacterium | flavum | | | B11474 | | | | | |
| Brevibacterium | flavum | | | B11472 | | | | | |
| Brevibacterium | flavum | 21127 | | | | | | | |
| Brevibacterium | flavum | 21128 | | | | | | | |
| Brevibacterium | flavum | 21427 | | | | | | | |
| Brevibacterium | flavum | 21475 | | | | | | | |
| Brevibacterium | flavum | 21517 | | | | | | | |
| Brevibacterium | flavum | 21528 | | | | | | | |
| Brevibacterium | flavum | 21529 | | | | | | | |
| Brevibacterium | flavum | | | B11477 | | | | | |
| Brevibacterium | flavum | | | B11478 | | | | | |
| Brevibacterium | flavum | 21127 | | | | | | | |
| Brevibacterium | flavum | | | B11474 | | | | | |
| Brevibacterium | healii | 15527 | | | | | | | |
| Brevibacterium | ketoglutamicum | 21004 | | | | | | | |
| Brevibacterium | ketoglutamicum | 21089 | | | | | | | |
| Brevibacterium | ketosoreductum | 21914 | | | | | | | |
| Brevibacterium | lactofermentum | | | | 70 | | | | |
| Brevibacterium | lactofermentum | | | | 74 | | | | |
| Brevibacterium | lactofermentum | | | | 77 | | | | |
| Brevibacterium | lactofermentum | 21798 | | | | | | | |
| Brevibacterium | lactofermentum | 21799 | | | | | | | |
| Brevibacterium | lactofermentum | 21800 | | | | | | | |
| Brevibacterium | lactofermentum | 21801 | | | | | | | |
| Brevibacterium | lactofermentum | | | B11470 | | | | | |
| Brevibacterium | lactofermentum | | | B11471 | | | | | |
| Brevibacterium | lactofermentum | 21086 | | | | | | | |
| Brevibacterium | lactofermentum | 21420 | | | | | | | |
| Brevibacterium | lactofermentum | 21086 | | | | | | | |
| Brevibacterium | lactofermentum | 31269 | | | | | | | |
| Brevibacterium | linens | 9174 | | | | | | | |
| Brevibacterium | linens | 19391 | | | | | | | |
| Brevibacterium | linens | 8377 | | | | | | | |
| Brevibacterium | paraffinolyticum | | | | | 11160 | | | |
| Brevibacterium | spec. | | | | | | 717.73 | | |
| Brevibacterium | spec. | | | | | | 717.73 | | |
| Brevibacterium | spec. | 14604 | | | | | | | |
| Brevibacterium | spec. | 21860 | | | | | | | |
| Brevibacterium | spec. | 21864 | | | | | | | |
| Brevibacterium | spec. | 21865 | | | | | | | |
| Brevibacterium | spec. | 21866 | | | | | | | |
| Brevibacterium | spec. | 19240 | | | | | | | |
| Corynebacterium | acetoacidophilum | 21476 | | | | | | | |
| Corynebacterium | acetoacidophilum | 13870 | | | | | | | |
| Corynebacterium | ammoniagenes | | | B11473 | | | | | |
| Corynebacterium | ammoniagenes | | | B11475 | | | | | |
| Corynebacterium | ammoniagenes | 15806 | | | | | | | |
| Corynebacterium | ammoniagenes | 21491 | | | | | | | |
| Corynebacterium | ammoniagenes | 31270 | | | | | | | |
| Corynebacterium | acetophilum | | | B3671 | | | | | |
| Corynebacterium | ammoniagenes | 6872 | | | | | | 2399 | |
| Corynebacterium | ammoniagenes | 15511 | | | | | | | |
| Corynebacterium | fujiokense | 21496 | | | | | | | |
| Corynebacterium | glutamicum | 14067 | | | | | | | |
| Corynebacterium | glutamicum | 39137 | | | | | | | |
| Corynebacterium | glutamicum | 21254 | | | | | | | |
| Corynebacterium | glutamicum | 21255 | | | | | | | |
| Corynebacterium | glutamicum | 31830 | | | | | | | |
| Corynebacterium | glutamicum | 13032 | | | | | | | |
| Corynebacterium | glutamicum | 14305 | | | | | | | |
| Corynebacterium | glutamicum | 15455 | | | | | | | |
| Corynebacterium | glutamicum | 13058 | | | | | | | |
| Corynebacterium | glutamicum | 13059 | | | | | | | |
| Corynebacterium | glutamicum | 13060 | | | | | | | |
| Corynebacterium | glutamicum | 21492 | | | | | | | |
| Corynebacterium | glutamicum | 21513 | | | | | | | |
| Corynebacterium | glutamicum | 21526 | | | | | | | |
| Corynebacterium | glutamicum | 21543 | | | | | | | |
| Corynebacterium | glutamicum | 13287 | | | | | | | |
| Corynebacterium | glutamicum | 21851 | | | | | | | |
| Corynebacterium | glutamicum | 21253 | | | | | | | |
| Corynebacterium | glutamicum | 21514 | | | | | | | |
| Corynebacterium | glutamicum | 21516 | | | | | | | |
| Corynebacterium | glutamicum | 21299 | | | | | | | |
| Corynebacterium | glutamicum | 21300 | | | | | | | |
| Corynebacterium | glutamicum | 39684 | | | | | | | |
| Corynebacterium | glutamicum | 21488 | | | | | | | |
| Corynebacterium | glutamicum | 21649 | | | | | | | |
| Corynebacterium | glutamicum | 21650 | | | | | | | |
| Corynebacterium | glutamicum | 19223 | | | | | | | |
| Corynebacterium | glutamicum | 13869 | | | | | | | |
| Corynebacterium | glutamicum | 21157 | | | | | | | |
| Corynebacterium | glutamicum | 21158 | | | | | | | |
| Corynebacterium | glutamicum | 21159 | | | | | | | |
| Corynebacterium | glutamicum | 21355 | | | | | | | |
| Corynebacterium | glutamicum | 31808 | | | | | | | |
| Corynebacterium | glutamicum | 21674 | | | | | | | |
| Corynebacterium | glutamicum | 21562 | | | | | | | |
| Corynebacterium | glutamicum | 21563 | | | | | | | |
| Corynebacterium | glutamicum | 21564 | | | | | | | |
| Corynebacterium | glutamicum | 21565 | | | | | | | |
| Corynebacterium | glutamicum | 21566 | | | | | | | |
| Corynebacterium | glutamicum | 21567 | | | | | | | |
| Corynebacterium | glutamicum | 21568 | | | | | | | |
| Corynebacterium | glutamicum | 21569 | | | | | | | |
| Corynebacterium | glutamicum | 21570 | | | | | | | |
| Corynebacterium | glutamicum | 21571 | | | | | | | |
| Corynebacterium | glutamicum | 21572 | | | | | | | |
| Corynebacterium | glutamicum | 21573 | | | | | | | |
| Corynebacterium | glutamicum | 21579 | | | | | | | |
| Corynebacterium | glutamicum | 19049 | | | | | | | |
| Corynebacterium | glutamicum | 19050 | | | | | | | |
| Corynebacterium | glutamicum | 19051 | | | | | | | |
| Corynebacterium | glutamicum | 19052 | | | | | | | |
| Corynebacterium | glutamicum | 19053 | | | | | | | |
| Corynebacterium | glutamicum | 19054 | | | | | | | |
| Corynebacterium | glutamicum | 19055 | | | | | | | |
| Corynebacterium | glutamicum | 19056 | | | | | | | |
| Corynebacterium | glutamicum | 19057 | | | | | | | |
| Corynebacterium | glutamicum | 19058 | | | | | | | |
| Corynebacterium | glutamicum | 19059 | | | | | | | |
| Corynebacterium | glutamicum | 19060 | | | | | | | |
| Corynebacterium | glutamicum | 19185 | | | | | | | |
| Corynebacterium | glutamicum | 13286 | | | | | | | |
| Corynebacterium | glutamicum | 21515 | | | | | | | |
| Corynebacterium | glutamicum | 21527 | | | | | | | |
| Corynebacterium | glutamicum | 21544 | | | | | | | |
| Corynebacterium | glutamicum | 21492 | | | | | | | |
| Corynebacterium | glutamicum | | | B8183 | | | | | |
| Corynebacterium | glutamicum | | | B8182 | | | | | |
| Corynebacterium | glutamicum | | | B12416 | | | | | |
| Corynebacterium | glutamicum | | | B12417 | | | | | |
| Corynebacterium | glutamicum | | | B12418 | | | | | |
| Corynebacterium | glutamicum | | | B11476 | | | | | |
| Corynebacterium | glutamicum | 21608 | | | | | | | |
| Corynebacterium | lilium | | P973 | | | | | | |
| Corynebacterium | nitrilophilus | 21419 | | | | 11594 | | | |
| Corynebacterium | spec. | | P4445 | | | | | | |
| Corynebacterium | spec. | | P4446 | | | | | | |
| Corynebacterium | spec. | 31088 | | | | | | | |
| Corynebacterium | spec. | 31089 | | | | | | | |
| Corynebacterium | spec. | 31090 | | | | | | | |
| Corynebacterium | spec. | 31090 | | | | | | | |
| Corynebacterium | spec. | 31090 | | | | | | | |
| Corynebacterium | spec. | 15954 | | | | | | | 20145 |
| Corynebacterium | spec. | 21857 | | | | | | | |
| Corynebacterium | spec. | 21862 | | | | | | | |
| Corynebacterium | spec. | 21863 | | | | | | | |

ATCC: American Type Culture Collection, Rockville, MD, USA
FERM: Fermentation Research Institute, Chiba, Japan
NRRL: ARS Culture Collection, Northern Regional Research Laboratory, Peoria, IL, USA
CECT: Coleccion Espanola de Cultivos Tipo, Valencia, Spain
NCIMB: National Collection of Industrial and Marine Bacteria Ltd., Aberdeen, UK
CBS: Centraalbureau voor Schimmelcultures, Baarn, NL
NCTC: National Collection of Type Cultures, London, UK
DSMZ: Deutsche Sammlung von Mikroorganismen und Zellkulturen, Braunschweig, Germany
For reference see Sugawara, H. et al. (1993) World directory of collections of cultures of microorganisms: Bacteria, fungi and yeasts (4^{th} edn), World federation for culture collections world data center on microorganisms, Saimata, Japen.

[0172] TABLE 4
ALIGNMENT RESULTS

| | | | | | | | % | |
|---|---|---|---|---|---|---|---|---|
| | | | | | | | homol- | |
| | length | Genbank | | Acces- | | Source of | ogy | Date of |
| ID # | (NT) | Hit | Length | sion | Name of Genbank Hit | Genbank Hit | (GAP) | Deposit |
| rxa00004 | 594 | GB_IN1: | 34660 | U58762 | Caenorhabditis elegans | Caenorhabditis | 36,442 | 24-MAY-1996 |
| | | CELT27F7 | | | cosmid T27F7. | elegans | | |
| | | GB_PR4: | 161910 | AC005531 | Homo sapiens PAC | Homo sapiens | 36,672 | 13-Jan-99 |
| | | AC005531 | | | clone DJ0701O16 | | | |
| | | | | | from 7q33-q36, | | | |
| | | | | | complete sequence. | | | |
| | | GB_EST36: | 360 | AV186136 | AV186136 Yuji Kohara | Caenorhabditis | 44,380 | 22-Jul-99 |
| | | AV186136 | | | unpublished cDNA: | elegans | | |
| | | | | | Strain N2 hermaphrodite | | | |
| | | | | | embryo | | | |
| | | | | | Caenorhabditis elegans | | | |
| | | | | | cDNA clone yk495f12 | | | |
| | | | | | 5′, mRNA sequence. | | | |
| rxa00006 | 558 | GB_BA1: | 8734 | AB024708 | Corynebacterium | Corynebacterium | 39,525 | 13-MAR-1999 |
| | | AB024708 | | | glutamicum gltB and | glutamicum | | |
| | | | | | gltD genes for | | | |
| | | | | | glutamine | | | |
| | | | | | 2-oxoglutarate | | | |
| | | | | | aminotransferase | | | |
| | | | | | large and small | | | |
| | | | | | subunits, complete cds. | | | |
| | | GB_EST5: | 434 | N23892 | yw46f12.s1 Weizmann | Homo sapiens | 38,462 | 28-DEC-1995 |
| | | N23892 | | | Olfactory Epithelium | | | |
| | | | | | Homo sapiens cDNA clone | | | |
| | | | | | IMAGE: 255311 3′, | | | |
| | | | | | mRNA sequence. | | | |
| | | GB_BA1: | 8734 | AB024708 | Corynebacterium | Corynebacterium | 38,961 | 13-MAR-1999 |
| | | AB024708 | | | glutamicum gltB and | glutamicum | | |
| | | | | | gltD genes for glutamine | | | |
| | | | | | 2-oxoglutarate | | | |
| | | | | | aminotransferase | | | |
| | | | | | large and small | | | |
| | | | | | subunits, complete cds. | | | |
| rxa00029 | | | | | | | | |
| rxa00126 | | | | | | | | |
| rxa00129 | 1620 | GB_BA1: | 36330 | Z95121 | Mycobacterium | Mycobacterium | 40,788 | 17-Jun-98 |
| | | MTY20B11 | | | tuberculosis H37Rv | tuberculosis | | |
| | | | | | complete genome; | | | |
| | | | | | segment 139/162. | | | |
| | | GB_BA1: | 1799 | U14909 | Mycobacterium | Mycobacterium | 54,422 | 11-Sep-96 |
| | | MTU14909 | | | tuberculosis MtrB | tuberculosis | | |
| | | | | | (mtrB) gene, | | | |
| | | | | | complete cds. | | | |
| | | GB_HTG2: | 140702 | AC006888 | Caenorhabditis elegans | Caenorhabditis | 35,883 | 26-Feb-99 |
| | | AC006888 | | | clone | elegans | | |
| | | | | | Y61A9L, | | | |
| | | | | | *** SEQUENCING | | | |
| | | | | | IN PROGRESS ***, | | | |
| | | | | | 2 unordered pieces. | | | |
| rxa00130 | 801 | GB_BA1: | 36330 | Z95121 | Mycobacterium | Mycobacterium | 41,069 | 17-Jun-98 |
| | | MTY20B11 | | | tuberculosis | tuberculosis | | |
| | | | | | H37Rv complete | | | |
| | | | | | genome; segment 139/162. | | | |
| | | GB_BA1: | 689 | U01971 | Mycobacterium | Mycobacterium | 66,183 | 11-Sep-96 |
| | | MTU01971 | | | tuberculosis | tuberculosis | | |
| | | | | | H37Rv MtrA | | | |
| | | | | | (mtrA) gene, | | | |
| | | | | | complete cds. | | | |
| | | GB_BA1: | 618 | X92405 | N. meningitidis | Neisseria | 50,249 | 31-OCT-1995 |
| | | NMOMPR | | | ompR gene. | meningitidis | | |
| rxa00182 | 3225 | GB_BA1: | 3791 | Y09163 | C. glutamicum | Corynebacterium | 41,126 | 8-Sep-97 |
| | | CGPUTP | | | putP gene. | glutamicum | | |
| | | GB_BA1: | 5143 | AL021924 | Mycobacterium | Mycobacterium | 48,140 | 17-Jun-98 |
| | | MTV020 | | | tuberculosis | tuberculosis | | |
| | | | | | H37Rv complete | | | |
| | | | | | genome; segment | | | |
| | | | | | 94/162. | | | |
| | | GB_BA1: | 212610 | Z99122 | Bacillus subtilis | Bacillus | 44,221 | 24-Jun-99 |
| | | BSUB0019 | | | complete genome | subtilis | | |
| | | | | | (section 19 of 21): | | | |
| | | | | | from 3597091 to | | | |
| | | | | | 3809700. | | | |
| rxa00221 | 342 | GB_PL2: | 1415 | AF020584 | Welwitschia mirabilis | Mitochondrion | 36,656 | 5-Jan-99 |
| | | AF020584 | | | cytochrome c oxidase | Welwitschia | | |
| | | | | | (coxl) gene, | mirabilis | | |
| | | | | | mitochondrial gene | | | |
| | | | | | encoding mitochondrial | | | |
| | | | | | protein, partial cds. | | | |
| | | GB_PR4: | 95240 | AC007421 | Homo sapiens chromosome | Homo sapiens | 35,061 | 27-Aug-99 |
| | | AC007421 | | | 17, clone hRPC.1030_O_14, | | | |
| | | | | | complete sequence. | | | |
| | | GB_BA2: | 60232 | AE001272 | Lactococcus lactis | Lactococcus | 37,764 | 11-Sep-98 |
| | | AE001272 | | | DPC3147 plasmid | lactis | | |
| | | | | | pMRC01, complete | | | |
| | | | | | plasmid sequence. | | | |
| rxa00253 | 861 | GB_BA2: | 1638 | AF126953 | Corynebacterium | Corynebacterium | 41,107 | 10-Sep-99 |
| | | AF126953 | | | glutamicum | glutamicum | | |
| | | | | | cystathionine | | | |
| | | | | | gamma-synthase | | | |
| | | | | | (metB) gene, | | | |
| | | | | | complete cds. | | | |
| | | GB_PR3: | 148440 | AL096791 | Human DNA sequence | Homo sapiens | 36,190 | 23-Nov-99 |
| | | HSJ659F15 | | | from clone 659F15 | | | |
| | | | | | on chromosome | | | |
| | | | | | Xp11.21-11.4, | | | |
| | | | | | complete sequence. | | | |
| | | GB_HTG1: | 129149 | Z98044 | Homo sapiens | Homo sapiens | 36,450 | 23-Nov-99 |
| | | HS510D11 | | | chromosome 1 clone | | | |
| | | | | | RP3-510D11, | | | |
| | | | | | *** SEQUENCING | | | |
| | | | | | IN PROGRESS ***, in | | | |
| | | | | | unordered pieces. | | | |
| rxa00284 | 1188 | GB_PR2: | 108260 | Z98880 | Human DNA sequence | Homo sapiens | 38,370 | 23-Nov-99 |
| | | HS179P9 | | | from PAC 179P9 on | | | |
| | | | | | chromosome 6q22. | | | |
| | | | | | Contains transmembrane | | | |
| | | | | | tyrosine-specific | | | |
| | | | | | protein kinase | | | |
| | | | | | (ROS1), ESTs and STS. | | | |
| | | GB_PR4: | 113345 | AF109076 | Homo sapiens | Homo sapiens | 35,340 | 13-DEC-1998 |
| | | AF109076 | | | chromosome 7 | | | |
| | | | | | map 7q36 BAC H6, | | | |
| | | | | | complete sequence. | | | |
| | | GB_PR2: | 108260 | Z98880 | Human DNA sequence | Homo sapiens | 35,344 | 23-Nov-99 |
| | | HS179P9 | | | from PAC 179P9 on | | | |
| | | | | | chromosome 6q22. | | | |
| | | | | | Contains transmembrane | | | |
| | | | | | tyrosine-specific | | | |
| | | | | | protein kinase | | | |
| | | | | | (ROS1), ESTs and STS. | | | |
| rxa00287 | 597 | GB_IN2: | 7887 | AF144549 | Aedes albopictus | Aedes | 39,828 | 3-Jun-99 |
| | | AF144549 | | | ribosomal protein | albopictus | | |
| | | | | | L34 (rpl34) gene, | | | |
| | | | | | complete cds. | | | |
| | | GB_EST15: | 503 | AA475366 | vh14e09.r1 Soares | Mus musculus | 37,063 | 18-Jun-97 |
| | | AA475366 | | | mouse mammary gland | | | |
| | | | | | NbMMG Mus musculus | | | |
| | | | | | cDNA clone | | | |
| | | | | | IMAGE: 875464 5′ | | | |
| | | | | | similar to gb: X87671 | | | |
| | | | | | M. musculus mRNA | | | |
| | | | | | for 3BP-1, an SH3 | | | |
| | | | | | domain binding | | | |
| | | | | | (MOUSE);, | | | |
| | | | | | mRNA sequence. | | | |
| | | GB_RO: | 2359 | X87671 | M. musculus mRNA for | Mus musculus | 34,635 | 20-OCT-1995 |
| | | MM3BP1 | | | 3BP-1, an SH3 domain | | | |
| | | | | | binding protein. | | | |
| rxa00291 | 1606 | GB_PR4: | 138107 | AC004967 | Homo sapiens clone | Homo sapiens | 36,785 | 5-Jun-99 |
| | | AC004967 | | | DJ1111F22, | | | |
| | | | | | complete sequence. | | | |
| | | GB_EST1: | 418 | M89319 | CEL21A4 Chris Martin | Caenorhabditis | 38,418 | 02-DEC-1992 |
| | | M89319 | | | sorted cDNA library | elegans | | |
| | | | | | Caenorhabditis elegans | | | |
| | | | | | cDNA clone | | | |
| | | | | | cm21a4 5′ similar to | | | |
| | | | | | pepsinogen A homologous | | | |
| | | | | | peptide, mRNA sequence. | | | |
| | | GB_GSS15: | 569 | AQ641399 | RPCI93-DpnII-28C1.TV | Trypanosoma | 39,106 | 8-Jul-99 |
| | | AQ641399 | | | RPCI93-DpnII | brucei | | |
| | | | | | Trypanosoma brucei | | | |
| | | | | | genomic clone | | | |
| | | | | | RPCI93-DpnII-28C1, | | | |
| | | | | | genomic survey | | | |
| | | | | | sequence. | | | |
| rxa00292 | 777 | GB_PL1: | 2112 | M34531 | S. cerevisiae | Saccharomyces | 37,330 | 27-Apr-93 |
| | | YSCKGD2 | | | dihydrolipoyl | cerevisiae | | |
| | | | | | transsuccinylase | | | |
| | | | | | (KGD2) gene, | | | |
| | | | | | complete cds. | | | |
| | | GB_PL1: | 9851 | X61236 | S. cerevisiae | Saccharomyces | 36,070 | 06-DEC-1991 |
| | | SCNUM1 | | | NUM1 gene, | cerevisiae | | |
| | | | | | involved in nuclear | | | |
| | | | | | migration control. | | | |
| | | GB_PL1: | 43468 | Z50046 | S. cerevisiae | Saccharomyces | 36,070 | 11-Aug-97 |
| | | SC8358 | | | chromosome IV | cerevisiae | | |
| | | | | | cosmid 8358. | | | |
| rxa00319 | 549 | GB_BA1: | 282700 | D84432 | Bacillus subtilis | Bacillus | 43,258 | 6-Feb-99 |
| | | BACJH642 | | | DNA, 283 Kb region | subtilis | | |
| | | | | | containing skin | | | |
| | | | | | element. | | | |
| | | GB_BA1: | 213420 | Z99117 | Bacillus subtilis | Bacillus | 34,264 | 26-Nov-97 |
| | | BSUB0014 | | | complete genome | subtilis | | |
| | | | | | (section 14 of 21): | | | |
| | | | | | from 2599451 to | | | |
| | | | | | 2812870. | | | |
| | | GB_BA1: | 213420 | Z99117 | Bacillus subtilis | Bacillus | 35,622 | 26-NOV-97 |
| | | BSUB0014 | | | complete genome | subtilis | | |
| | | | | | (section 14 of 21): | | | |
| | | | | | from 2599451 | | | |
| | | | | | to 2812870. | | | |
| rxa00348 | 519 | GB_PL2: | 68554 | AC007045 | Arabidopsis thaliana | Arabidopsis | 43,513 | 31-MAR-1999 |
| | | ATAC007045 | | | chromosome II BAC | thaliana | | |
| | | | | | F23M2 genomic sequence, | | | |
| | | | | | complete sequence. | | | |
| | | GB_PL2: | 5777 | AJ133743 | Arabidopsis thaliana | Arabidopsis | 38,247 | 18-Jun-99 |
| | | ATH133743 | | | ttg1 gene. | thaliana | | |
| | | GB_PL1: | 74589 | AB010068 | Arabidopsis thaliana | Arabidopsis | 34,387 | 20-Nov-99 |
| | | AB010068 | | | genomic DNA, | thaliana | | |
| | | | | | chromosome 5, | | | |
| | | | | | TAC clone: K18P6, | | | |
| | | | | | complete sequence. | | | |
| rxa00350 | 450 | GB_PL1: | 54719 | Z70678 | S. cerevisiae | Saccharomyces | 35,347 | 16-MAY-1997 |
| | | SCXV55KB | | | chromosome XV | cerevisiae | | |
| | | | | | DNA, 54.7 kb region. | | | |
| | | GB_PL1: | 1732 | Z74960 | S. cerevisiae | Saccharomyces | 35,347 | 11-Aug-97 |
| | | SCYOR052C | | | chromosome XV | cerevisiae | | |
| | | | | | reading frame | | | |
| | | | | | ORF YOR052c. | | | |
| | | GB_BA1: | 2600 | AJ006703 | Pseudanabaena sp | Pseudanabaena | 37,978 | 19-Jan-99 |
| | | PSE6703 | | | gene encoding | sp. | | |
| | | | | | for glutamine | | | |
| | | | | | synthetase. | | | |
| rxa00363 | 843 | GB_VI: | 9215 | M27470 | Simian | Simian | 35,379 | 13-MAR-1997 |
| | | SIVMNDGB1 | | | immunodeficiency | immunodeficiency | | |
| | | | | | virus, complete genome. | virus | | |
| | | GB_OM: | 1198 | U35642 | Bos taurus alpha 1- | Bos taurus | 40,131 | 5-Sep-96 |
| | | BTU35642 | | | microglobulin/bikunin | | | |
| | | | | | mRNA, complete cds. | | | |
| | | GB_PL1: | 1633 | AJ011518 | Malus domestica acc | Malus | 40,343 | 23-OCT-1998 |
| | | MDO011518 | | | synthase gene, | domestica | | |
| | | | | | exons 1-4, partial. | | | |
| rxa00400 | 1002 | GB_HTG2: | 203407 | AC006174 | Homo sapiens | Homo sapiens | 38,320 | 09-DEC-1998 |
| | | AC006174 | | | chromosome 10 clone | | | |
| | | | | | CIT987SK-1057L21 | | | |
| | | | | | map 10q25, | | | |
| | | | | | *** SEQUENCING | | | |
| | | | | | IN PROGRESS ***, | | | |
| | | | | | 6 unordered pieces. | | | |
| | | GB_HTG2: | 203407 | AC006174 | Homo sapiens | Homo sapiens | 38,320 | 09-DEC-1998 |
| | | AC006174 | | | chromosome 10 clone | | | |
| | | | | | CIT987SK-1057L21 | | | |
| | | | | | map 10q25, | | | |
| | | | | | ***SEQUENCING | | | |
| | | | | | IN PROGRESS ***, | | | |
| | | | | | 6 unordered pieces. | | | |
| | | GB_HTG2: | 203407 | AC006174 | Homo sapiens | Homo sapiens | 37,693 | 09-DEC-1998 |
| | | AC006174 | | | chromosome 10 clone | | | |
| | | | | | CIT987SK-1057L21 | | | |
| | | | | | map 10q25, | | | |
| | | | | | ***SEQUENCING | | | |
| | | | | | IN PROGRESS ***, | | | |
| | | | | | 6 unordered pieces. | | | |
| rxa00464 | | | | | | | | |
| rxa00494 | 420 | GB_BA2: | 40897 | AF004835 | Brevibacillus brevis | Brevibacillus | 40,500 | 18-NOV-97 |
| | | AF004835 | | | tyrocidine | brevis | | |
| | | | | | biosynthesis operon, | | | |
| | | | | | tyrocidine synthetase | | | |
| | | | | | 1 (tycA), tyrocidine | | | |
| | | | | | synthetase 2 (tycB), | | | |
| | | | | | tyrocidine synthetase | | | |
| | | | | | 3 (tycC), putative | | | |
| | | | | | ABC-transporter | | | |
| | | | | | TycD (tycD), putative | | | |
| | | | | | ABC-transporter TycE | | | |
| | | | | | (tycE) and putative | | | |
| | | | | | thioesterase GrsT | | | |
| | | | | | homolog (tycF) genes, | | | |
| | | | | | complete cds. | | | |
| | | GB_PR3: | 78011 | AL008712 | Human DNA sequence | Homo sapiens | 35,749 | 23-Nov-99 |
| | | HS84F12 | | | from PAC 84F12 on | | | |
| | | | | | chromosome Xq25-Xq26.3. | | | |
| | | | | | Contains glypican-3 | | | |
| | | | | | precursor (intestinal | | | |
| | | | | | protein OCI-5) | | | |
| | | | | | (GTR2-2), ESTs and | | | |
| | | | | | CA repeat. | | | |
| | | GB_PR3: | 37005 | AC005239 | Homo sapiens chromosome | Homo sapiens | 33,663 | 3-Jul-98 |
| | | AC005239 | | | 19, cosmid F23149, | | | |
| | | | | | complete sequence. | | | |
| rxa00516 | 843 | GB_PR3: | 206880 | AF020503 | Homo sapiens FRA3B | Homo sapiens | 40,503 | 23-Jan-98 |
| | | AF020503 | | | common fragile | | | |
| | | | | | region, diadenosine | | | |
| | | | | | triphosphate hydrolase | | | |
| | | | | | (FHIT) gene, exon 5. | | | |
| | | GB_HTG2: | 210344 | AC007100 | Homo sapiens clone | Homo sapiens | 37,226 | 7-Apr-99 |
| | | AC007100 | | | NH0462D13, | | | |
| | | | | | *** SEQUENCING | | | |
| | | | | | IN PROGRESS ***, | | | |
| | | | | | 5 unordered pieces. | | | |
| | | GB_HTG2: | 210344 | AC007100 | Homo sapiens clone | Homo sapiens | 37,226 | 7-Apr-99 |
| | | AC007100 | | | NH0462D13, | | | |
| | | | | | *** SEQUENCING | | | |
| | | | | | IN PROGRESS ***, | | | |
| | | | | | 5 unordered pieces. | | | |
| rxa00551 | 594 | GB_EST27: | 607 | AI405761 | GH25883.5prime GH | Drosophila | 40,481 | 8-Feb-99 |
| | | AI405761 | | | Drosophila melanogaster | melanogaster | | |
| | | | | | head pOT2 | | | |
| | | | | | Drosophila melanogaster | | | |
| | | | | | cDNA clone GH25883 | | | |
| | | | | | 5prime, mRNA sequence. | | | |
| | | GB_EST27: | 607 | AI405774 | GH25902.5prime GH | Drosophila | 40,481 | 8-Feb-99 |
| | | AI405774 | | | Drosophila melanogaster | melanogaster | | |
| | | | | | head pOT2 | | | |
| | | | | | Drosophila melanogaster | | | |
| | | | | | cDNA clone GH25902 | | | |
| | | | | | 5prime, mRNA sequence. | | | |
| | | GB_EST22: | 674 | AI063444 | GH03263.5prime GH | Drosophila | 40,437 | 24-Nov-98 |
| | | AI063444 | | | Drosophila melanogaster | melanogaster | | |
| | | | | | head pOT2 | | | |
| | | | | | Drosophila melanogaster | | | |
| | | | | | cDNA clone GH03263 | | | |
| | | | | | 5prime, | | | |
| | | | | | mRNA sequence. | | | |
| rxa00583 | 861 | GB_BA1: | 2570 | L07603 | Corynebacterium | Corynebacterium | 97,310 | 26-Apr-93 |
| | | CORAHPS | | | glutamicum | glutamicum | | |
| | | | | | 3-deoxy-D- | | | |
| | | | | | arabinoheptulosonate- | | | |
| | | | | | 7-phosphate | | | |
| | | | | | synthase gene, | | | |
| | | | | | complete cds. | | | |
| | | GB_BA1: | 67200 | AL021897 | Mycobacterium | Mycobacterium | 58,769 | 24-Jun-99 |
| | | MTV017 | | | tuberculosis | tuberculosis | | |
| | | | | | H37Rv complete | | | |
| | | | | | genome; segment | | | |
| | | | | | 48/162. | | | |
| | | GB_IN1: | 849 | X68555 | A. californica | Aplysia | 41,417 | 30-Jun-98 |
| | | ACKRPA | | | KRP-A gene. | californica | | |
| rxa00592 | 582 | GB_IN2: | 62091 | AC005467 | Drosophila | Drosophila | 33,565 | 12-DEC-1998 |
| | | AC005467 | | | melanogaster, | melanogaster | | |
| | | | | | chromosome 2R, | | | |
| | | | | | region 48C1-48C2, | | | |
| | | | | | P1 clone | | | |
| | | | | | DS00568, complete | | | |
| | | | | | sequence. | | | |
| | | GB_IN2: | 62091 | AC005467 | Drosophila | Drosophila | 35,893 | 12-DEC-1998 |
| | | AC005467 | | | melanogaster, | melanogaster | | |
| | | | | | chromosome 2R, | | | |
| | | | | | region 48C1-48C2, | | | |
| | | | | | P1 clone DS00568, | | | |
| | | | | | complete sequence. | | | |
| rxa00593 | 471 | GB_BA1: | 121125 | AL022121 | Mycobacterium | Mycobacterium | 33,761 | 24-Jun-99 |
| | | MTV025 | | | tuberculosis | tuberculosis | | |
| | | | | | H37Rv complete | | | |
| | | | | | genome; | | | |
| | | | | | segment 155/162. | | | |
| | | GB_BA1: | 37770 | L01263 | M. leprae genomic dna | Mycobacterium | 35,065 | 14-Jun-96 |
| | | MSGB577CO | | | sequence, cosmid b577. | leprae | | |
| | | S | | | | | | |
| | | GB_BA2: | 2366 | AF114720 | Xanthomonas | Xanthomonas | 37,768 | 1-Feb-99 |
| | | AF114720 | | | campestris pv. | campestris | | |
| | | | | | vesicatoria | pv. | | |
| | | | | | avirulence protein | vesicatoria | | |
| | | | | | AvrBs2 (avrBs2) gene, | | | |
| | | | | | complete cds. | | | |
| rxa00603 | 576 | GB_BA1: | 4357 | X78346 | R. capsulatus (B10S) | Rhodobacter | 34,867 | 08-DEC-1995 |
| | | RCPUTRA | | | putR and | capsulatus | | |
| | | | | | putA genes. | | | |
| | | GB_GSS10: | 474 | AQ227452 | HS_2015_B2_B07_MR CIT | Homo sapiens | 35,337 | 26-Sep-98 |
| | | AQ227452 | | | Approved Human | | | |
| | | | | | Genomic Sperm | | | |
| | | | | | Library D Homo | | | |
| | | | | | sapiens genomic | | | |
| | | | | | clone Plate = | | | |
| | | | | | 2015 Col = 14 | | | |
| | | | | | Row = D, | | | |
| | | | | | genomic survey | | | |
| | | | | | sequence. | | | |
| | | GB_GSS3: | 251 | B60643 | CIT-HSP-2015D14.TRB | Homo sapiens | 39,200 | 21-Jun-98 |
| | | B60643 | | | CIT-HSP | | | |
| | | | | | Homo sapiens | | | |
| | | | | | genomic clone | | | |
| | | | | | 2015D14, genomic | | | |
| | | | | | survey sequence. | | | |
| rxa00609 | 558 | GB_HTG3: | 105005 | AC009346 | Drosophila | Drosophila | 31,261 | 27-Aug-99 |
| | | AC009346 | | | melanogaster | melanogaster | | |
| | | | | | chromosome 3 clone | | | |
| | | | | | BACR03P13 (D672) | | | |
| | | | | | RPCI-98 03.P.13 map | | | |
| | | | | | 83A-83B strain | | | |
| | | | | | y; cn bw sp, | | | |
| | | | | | *** SEQUENCING | | | |
| | | | | | IN PROGRESS***, | | | |
| | | | | | 83 unordered pieces. | | | |
| | | GB_HTG3: | 105005 | AC009346 | Drosophila | Drosophila | 31,261 | 27-Aug-99 |
| | | AC009346 | | | melanogaster | melanogaster | | |
| | | | | | chromosome 3 clone | | | |
| | | | | | BACR03P13 (D672) | | | |
| | | | | | RPCI-98 03.P.13 map | | | |
| | | | | | 83A-83B strain | | | |
| | | | | | y; cn bw sp, | | | |
| | | | | | *** SEQUENCING | | | |
| | | | | | IN PROGRESS***, | | | |
| | | | | | 83 unordered pieces. | | | |
| | | GB_HTG3: | 105005 | AC009346 | Drosophila | Drosophila | 30,072 | 27-Aug-99 |
| | | AC009346 | | | melanogaster | melanogaster | | |
| | | | | | chromosome 3 clone | | | |
| | | | | | BACR03P13 (D672) | | | |
| | | | | | RPCI-98 03.P.13 map | | | |
| | | | | | 83A-83B strain | | | |
| | | | | | y; cn bw sp, | | | |
| | | | | | *** SEQUENCING | | | |
| | | | | | IN PROGRESS***, | | | |
| | | | | | 83 unordered pieces. | | | |
| rxa00630 | 828 | GB_BA1: | 36850 | Z80226 | Mycobacterium | Mycobacterium | 60,870 | 17-Jun-98 |
| | | MTCY369 | | | tuberculosis | tuberculosis | | |
| | | | | | H37Rv complete | | | |
| | | | | | genome; | | | |
| | | | | | segment 36/162. | | | |
| | | GB_BA1: | 15560 | AL020958 | Streptomyces | Streptomyces | 48,474 | 10-DEC-1997 |
| | | SC4H8 | | | coelicolor | coelicolor | | |
| | | | | | cosmid 4H8. | | | |
| | | GB_BA1: | 37218 | Z77162 | Mycobacterium | Mycobacterium | 46,537 | 17-Jun-98 |
| | | MTCY20G9 | | | tuberculosis | tuberculosis | | |
| | | | | | H37Rv complete | | | |
| | | | | | genome; | | | |
| | | | | | segment 25/162. | | | |
| rxa00651 | 1455 | GB_PR2: | 100000 | AP000165 | Homo sapiens | Homo sapiens | 35,685 | 20-Nov-99 |
| | | AP000165 | | | genomic DNA, | | | |
| | | | | | chromosome 21q22.1, | | | |
| | | | | | D21S226-AML region, | | | |
| | | | | | clone B2344F14-f50E8, | | | |
| | | | | | segment 1/9, | | | |
| | | | | | complete sequence. | | | |
| | | GB_RO: | 132297 | AC005835 | Mus musculus clone | Mus musculus | 37,851 | 21-OCT-1998 |
| | | AC005835 | | | UWGC: mbac82 | | | |
| | | | | | from 14D1-D2 | | | |
| | | | | | (T-Cell Receptor | | | |
| | | | | | Alpha Locus), | | | |
| | | | | | complete sequence. | | | |
| | | GB_PR2: | 100000 | AP000165 | Homo sapiens | Homo sapiens | 35,610 | 20-Nov-99 |
| | | AP000165 | | | genomic DNA, | | | |
| | | | | | chromosome 21q22.1, | | | |
| | | | | | D21S226-AML | | | |
| | | | | | region, clone | | | |
| | | | | | B2344F14-f50E8, | | | |
| | | | | | segment 1/9, | | | |
| | | | | | complete sequence. | | | |
| rxa00655 | 762 | GB_PR3: | 113803 | AC004460 | Homo sapiens PAC | Homo sapiens | 38,606 | 24-MAR-1998 |
| | | AC004460 | | | clone DJ1086D14, | | | |
| | | | | | complete sequence. | | | |
| | | GB_PL1: | 7707 | M87526 | Chlamydomonas | Chlamydomonas | 39,067 | 27-Apr-93 |
| | | CRERSP4A | | | reinhardtii | reinhardtii | | |
| | | | | | flagellar radial | | | |
| | | | | | spoke protein | | | |
| | | | | | (RSP4) and RSP6) | | | |
| | | | | | genes, complete cds. | | | |
| | | GB_EST38: | 517 | AW041495 | EST284359 tomato mixed | Lycopersicon | 38,760 | 18-OCT-1999 |
| | | AW041495 | | | elicitor, BTI | esculentum | | |
| | | | | | Lycopersicon esculentum | | | |
| | | | | | cDNA clone cLET14F2, | | | |
| | | | | | mRNA sequence. | | | |
| rxa00813 | 1254 | GB_BA1: | 1009 | D38230 | Mycobacterium bovis | Mycobacterium | 40,956 | 8-Feb-99 |
| | | MSGMPB70B | | | DNA for MPB70, | bovis | | |
| | | | | | complete cds, | | | |
| | | | | | strain: BCG Tokyo. | | | |
| | | GB_BA1: | 39991 | Z74024 | Mycobacterium | Mycobacterium | 41,447 | 19-Jun-98 |
| | | MTCY274 | | | tuberculosis H37Rv | tuberculosis | | |
| | | | | | complete genome; | | | |
| | | | | | segment 126/162. | | | |
| | | GB_BA1: | 1009 | D38229 | Mycobacterium bovis | Mycobacterium | 40,956 | 8-Feb-99 |
| | | MSGMPB70A | | | DNA for MPB70, | bovis | | |
| | | | | | complete cds, strain: | | | |
| | | | | | BCG Pasteur. | | | |
| rxa00822 | 804 | GB_BA1: | 121125 | AL022121 | Mycobacterium | Mycobacterium | 64,925 | 24-Jun-99 |
| | | MTV025 | | | tuberculosis H37Rv | tuberculosis | | |
| | | | | | complete genome; | | | |
| | | | | | segment 155/162. | | | |
| | | GB_EST35: | 646 | AI857185 | 603007G10.x1 603 - | Zea mays | 40,206 | 16-Jul-99 |
| | | AI857185 | | | stressed root | | | |
| | | | | | cDNA library from | | | |
| | | | | | Wang/Bohnert lab | | | |
| | | | | | Zea mays cDNA, | | | |
| | | | | | mRNA sequence. | | | |
| | | GB_PR3: | 138849 | 297181 | Homo sapiens DNA | Homo sapiens | 37,633 | 23-NOV-99 |
| | | HS95C20 | | | sequence from PAC | | | |
| | | | | | 95C20 on chromosome | | | |
| | | | | | Xp11.3-11.4. | | | |
| | | | | | Contains STSs and | | | |
| | | | | | the DXS7 locus | | | |
| | | | | | with GT and GTG repeat | | | |
| | | | | | polymorphisms, | | | |
| | | | | | complete sequence. | | | |
| rxa00848 | 2043 | GB_BA1: | 34331 | Z95584 | Mycobacterium | Mycobacterium | 63,215 | 17-Jun-98 |
| | | MTCI65 | | | tuberculosis H37Rv | tuberculosis | | |
| | | | | | complete genome; | | | |
| | | | | | segment 50/162. | | | |
| | | GB_BA1: | 40056 | AD000020 | Mycobacterium | Mycobacterium | 47,938 | 10-DEC-1996 |
| | | MSGY348 | | | tuberculosis sequence | tuberculosis | | |
| | | | | | from clone y348. | | | |
| | | GB_HTG3: | 207341 | AC008608 | Homo sapiens | Homo sapiens | 43,001 | 3-Aug-99 |
| | | AC008608 | | | chromosome 5 clone | | | |
| | | | | | CIT978SKB_13I20, | | | |
| | | | | | *** SEQUENCING IN | | | |
| rxa00849 | 444 | GB_HTG4: | 216524 | AC007305 | Mus musculus, | Mus musculus | 38,979 | 23-OCT-1999 |
| | | AC007305 | | | *** SEQUENCING IN | | | |
| | | | | | PROGRESS ***, | | | |
| | | | | | 10 unordered pieces. | | | |
| | | GB_HTG4: | 216524 | AC007305 | Mus musculus, | Mus musculus | 38,979 | 23-OCT-1999 |
| | | AC007305 | | | *** SEQUENCING IN | | | |
| | | | | | PROGRESS ***, | | | |
| | | | | | 10 unordered pieces. | | | |
| | | GB_HTG4: | 216524 | AC007305 | Mus musculus, | Mus musculus | 36,636 | 23-OCT-1999 |
| | | AC007305 | | | *** SEQUENCING IN | | | |
| | | | | | PROGRESS ***, | | | |
| | | | | | 10 unordered pieces. | | | |
| rxa00885 | 1149 | GB_EST36: | 300 | AV178106 | AV178106 Yuji Kohara | Caenorhabditis | 39,057 | 21-Jul-99 |
| | | AV178106 | | | unpublished cDNA: | elegans | | |
| | | | | | Strain N2 hermaphrodite | | | |
| | | | | | embryo | | | |
| | | | | | Caenorhabditis elegans | | | |
| | | | | | cDNA clone yk538b7 | | | |
| | | | | | 3′, mRNA sequence. | | | |
| | | GB_EST16: | 300 | C30090 | C30090 Yuji Kohara | Caenorhabditis | 38,000 | 18-OCT-1999 |
| | | C30090 | | | unpublished cDNA: | elegans | | |
| | | | | | Strain N2 hermaphrodite | | | |
| | | | | | embryo | | | |
| | | | | | Caenorhabditis elegans | | | |
| | | | | | cDNA clone yk236d2 | | | |
| | | | | | 3′, mRNA sequence. | | | |
| | | GB_IN1: | 32679 | Z68220 | Caenorhabditis elegans | Caenorhabditis | 36,067 | 2-Sep-99 |
| | | CET20D3 | | | cosmid T20D3, | elegans | | |
| | | | | | complete sequence. | | | |
| rxa00894 | 1251 | GB_EST20: | 281 | AA890839 | TENS0689 T. cruzi | Trypanosoma | 39,779 | 29-OCT-1998 |
| | | AA890839 | | | epimastigote | cruzi | | |
| | | | | | normalized cDNA | | | |
| | | | | | Library | | | |
| | | | | | Trypanosoma cruzi | | | |
| | | | | | cDNA clone 689 5′, | | | |
| | | | | | mRNA sequence. | | | |
| | | GB_EST20: | 284 | AA890838 | TENS0687 T. cruzi | Trypanosoma | 39,674 | 29-OCT-1998 |
| | | AA890838 | | | epimastigote | cruzi | | |
| | | | | | normalized cDNA | | | |
| | | | | | Library | | | |
| | | | | | Trypanosoma cruzi | | | |
| | | | | | cDNA clone 687 | | | |
| | | | | | 5′, mRNA sequence. | | | |
| | | GB_RO: | 1709 | X97192 | R. norvegicus MAFA | Rattus | 36,989 | 17-Apr-96 |
| | | RNMAFAEX2 | | | gene, exon2. | norvegicus | | |
| rxa00947 | 459 | GB_EST6: | 420 | W04640 | zb93b03.s1 Soares_{—} | Homo sapiens | 43,519 | 23-Apr-96 |
| | | W04640 | | | parathyroid_tumor_{—} | | | |
| | | | | | NbHPA Homo sapiens | | | |
| | | | | | cDNA clone IMAGE: | | | |
| | | | | | 320333 3′, | | | |
| | | | | | mRNA sequence. | | | |
| | | GB_EST6: | 420 | W04640 | zb93b03.s1 Soares_{—} | Homo sapiens | 37,725 | 23-Apr-96 |
| | | W04640 | | | parathyroid_{—} | | | |
| | | | | | tumor_NbHPA | | | |
| | | | | | Homo sapiens cDNA | | | |
| | | | | | clone IMAGE: | | | |
| | | | | | 320333 3′, | | | |
| | | | | | mRNA sequence. | | | |
| rxa01001 | | | | | | | | |
| rxa01065 | 1038 | GB_BA1: | 27548 | Z95208 | Mycobacterium | Mycobacterium | 38,949 | 17-Jun-98 |
| | | MTCY27 | | | tuberculosis H37Rv | tuberculosis | | |
| | | | | | complete genome; | | | |
| | | | | | segment 104/162. | | | |
| | | GB_BA2: | 35209 | AF065159 | Bradyrhizobium | Bradyrhizobium | 46,369 | 27-OCT-1999 |
| | | AF065159 | | | japonicum putative | japonicum | | |
| | | | | | arylsulfatase | | | |
| | | | | | (arsA), putative | | | |
| | | | | | soluble lytic | | | |
| | | | | | transglycosylase | | | |
| | | | | | precursor (sltA), | | | |
| | | | | | dihydrodipicolinate | | | |
| | | | | | synthase (dapA), MscL | | | |
| | | GB_HTG2: | 297866 | AC006794 | Caenorhabditis elegans | Caenorhabditis | 34,676 | 23-Feb-99 |
| | | AC006794 | | | clone Y50D4a, | elegans | | |
| | | | | | *** SEQUENCING | | | |
| | | | | | IN PROGRESS***, | | | |
| | | | | | 29 unordered pieces. | | | |
| rxa01110 | 696 | GB_HTG7: | 204901 | AC009530 | Homo sapiens | Homo sapiens | 36,364 | 08-DEC-1999 |
| | | AC009530 | | | chromosome 7, | | | |
| | | | | | *** SEQUENCING | | | |
| | | | | | IN PROGRESS ****, | | | |
| | | | | | 32 unordered pieces. | | | |
| | | GB_HTG3: | 163369 | AC009301 | Homo sapiens clone | Homo sapiens | 34,538 | 13-Aug-99 |
| | | AC009301 | | | NH0062F14, | | | |
| | | | | | *** SEQUENCING | | | |
| | | | | | IN PROGRESS ***, | | | |
| | | | | | 5 unordered pieces. | | | |
| | | GB_HTG3: | 163369 | AC009301 | Homo sapiens clone | Homo sapiens | 34,538 | 13-Aug-99 |
| | | AC009301 | | | NH0062F14, | | | |
| | | | | | *** SEQUENCING | | | |
| | | | | | IN PROGRESS ***, | | | |
| | | | | | 5 unordered pieces. | | | |
| rxa01118 | 888 | GB_BA2: | 5475 | AF003947 | Rhodococcus opacus | Rhodococcus | 55,982 | 12-MAR-1998 |
| | | AF003947 | | | succinyl CoA: | opacus | | |
| | | | | | 3-oxoadipate CoA | | | |
| | | | | | transferase | | | |
| | | | | | subunit homolog | | | |
| | | | | | (pcal′) | | | |
| | | | | | gene, partial cds, | | | |
| | | | | | protocatechuate | | | |
| | | | | | dioxygenase beta | | | |
| | | | | | subunit (pcaH), | | | |
| | | | | | protocatechuate | | | |
| | | | | | dioxygenase | | | |
| | | | | | alpha subunit | | | |
| | | | | | (pcaG), 3-carboxy- | | | |
| | | | | | cis,cis-muconate | | | |
| | | | | | cycloisomerase | | | |
| | | | | | homolog (pcaB), | | | |
| | | | | | 3-oxoadipate | | | |
| | | | | | enol-lactone | | | |
| | | | | | hydrolase/ | | | |
| | | | | | 4-carboxymuconolactone | | | |
| | | | | | decarboxylase | | | |
| | | | | | (pcaL) and PcaR | | | |
| | | | | | (pcaR) genes, | | | |
| | | | | | complete cds, | | | |
| | | | | | and 3-oxoadipyl | | | |
| | | | | | CoA thiolase | | | |
| | | | | | homolog (pcaF′) | | | |
| | | | | | gene, partial cds. | | | |
| | | GB_BA1: | 7224 | X99622 | Rhodococcus opacus | Rhodococcus | 40,000 | 24-Sep-97 |
| | | ROX99622 | | | catR, catA, catB, | opacus | | |
| | | | | | catC genes and | | | |
| | | | | | five ORFs. | | | |
| | | GB_IN1: | 42966 | U29082 | Caenorhabditis elegans | Caenorhabditis | 37,485 | 15-Jun-95 |
| | | CELC14F5 | | | cosmid C14F5. | elegans | | |
| rxa01125 | 336 | GB_EST16: | 360 | C41499 | C41499 Yuji Kohara | Caenorhabditis | 44,747 | 18-OCT-1999 |
| | | C41499 | | | unpublished cDNA: | elegans | | |
| | | | | | Strain N2 hermaphrodite | | | |
| | | | | | embryo | | | |
| | | | | | Caenorhabditis elegans | | | |
| | | | | | cDNA clone yk268f1 | | | |
| | | | | | 5′, mRNA sequence. | | | |
| | | GB_HTG2: | 195349 | AC006705 | Caenorhabditis elegans | Caenorhabditis | 42,415 | 23-Feb-99 |
| | | AC006705 | | | clone Y108G3c, | elegans | | |
| | | | | | *** SEQUENCING | | | |
| | | | | | IN PROGRESS***, | | | |
| | | | | | 2 unordered pieces. | | | |
| | | GB_IN2: | 36400 | AF067622 | Caenorhabditis elegans | Caenorhabditis | 42,415 | 27-MAY-1999 |
| | | CELF33E11 | | | cosmid F33E11. | elegans | | |
| rxa01211 | 1380 | GB_EST28: | 503 | AI520492 | LD40669.3prime | Drosophila | 40,726 | 16-MAR-1999 |
| | | AI520492 | | | LD Drosophila | melanogaster | | |
| | | | | | melanogaster | | | |
| | | | | | embryo pOT2 | | | |
| | | | | | Drosophila | | | |
| | | | | | melanogaster | | | |
| | | | | | cDNA clone LD40669 | | | |
| | | | | | 3prime, | | | |
| | | | | | mRNA sequence. | | | |
| | | GB_EST27: | 551 | AI403753 | GH23256.3prime GH | Drosophila | 41,316 | 8-Feb-99 |
| | | AI403753 | | | Drosophila | melanogaster | | |
| | | | | | melanogaster | | | |
| | | | | | head pOT2 | | | |
| | | | | | Drosophila | | | |
| | | | | | melanogaster | | | |
| | | | | | cDNA clone GH23256 | | | |
| | | | | | 3prime, mRNA sequence. | | | |
| | | GB_EST19: | 493 | AA391230 | LD10605.3prime LD | Drosophila | 38,415 | 27-Nov-98 |
| | | AA391230 | | | Drosophila | melanogaster | | |
| | | | | | melanogaster embryo | | | |
| | | | | | BlueScript | | | |
| | | | | | Drosophila | | | |
| | | | | | melanogaster | | | |
| | | | | | cDNA clone LD10605 | | | |
| | | | | | 3prime, mRNA sequence. | | | |
| rxa01241 | 603 | GB_BA1: | 36033 | U00019 | Mycobacterium leprae | Mycobacterium | 58,783 | 01-MAR-1994 |
| | | U00019 | | | cosmid B2235. | leprae | | |
| | | GB_BA1: | 22781 | L78826 | Mycobacterium leprae | Mycobacterium | 58,464 | 15-Jun-96 |
| | | MSGB42CS | | | cosmid B42 | leprae | | |
| | | | | | DNA sequence. | | | |
| | | GB_HTG5: | 173897 | AC007521 | Drosophila | Drosophila | 40,137 | 17-Nov-99 |
| | | AC007521 | | | melanogaster chromosome | melanogaster | | |
| | | | | | X clone BACR49A04 | | | |
| | | | | | (D698) RPCI-98 | | | |
| | | | | | 49.A.4 map 10A2-10B2 | | | |
| | | | | | strain y; cn bw sp, | | | |
| | | | | | *** SEQUENCING IN | | | |
| | | | | | PROGRESS***, | | | |
| | | | | | 56 unordered pieces. | | | |
| rxa01248 | 529 | GB_BA1: | 338534 | U14003 | Escherichia coli | Escherichia | 40,546 | 17-Apr-96 |
| | | ECOUW93 | | | K-12 chromosomal | coli | | |
| | | | | | region from 92.8 | | | |
| | | | | | to 00.1 minutes. | | | |
| | | GB_BA1: | 137740 | D90900 | Synechocystis sp. | Synechocystis | 32,177 | 7-Feb-99 |
| | | D90900 | | | PCC6803 complete | sp. | | |
| | | | | | genome, 2/27, | | | |
| | | | | | 133860-271599. | | | |
| | | GB_BA1: | 338534 | U14003 | Escherichia coli | Escherichia | 37,044 | 17-Apr-96 |
| | | ECOUW93 | | | K-12 chromosomal | coli | | |
| | | | | | region from 92.8 | | | |
| | | | | | to 00.1 minutes. | | | |
| rxa01272 | 726 | GB_EST10: | 520 | AA181367 | zp42c11.s1 Stratagene | Homo sapiens | 41,408 | 09-MAR-1998 |
| | | AA181367 | | | muscle 937209 | | | |
| | | | | | Homo sapiens cDNA | | | |
| | | | | | clone IMAGE: 612116 | | | |
| | | | | | 3′, mRNA sequence. | | | |
| | | GB_VI: | 330742 | U42580 | Paramecium bursaria | Paramecium | 38,265 | 4-Nov-99 |
| | | PBU42580 | | | Chlorella virus 1, | bursaria | | |
| | | | | | complete genome. | Chlorella | | |
| | | | | | | virus 1 | | |
| | | GB_VI: | 236120 | AF063866 | Melanoplus sanguinipes | Melanoplus | 38,579 | 22-DEC-1998 |
| | | AF063866 | | | entomopoxvirus, | sanguinipes | | |
| | | | | | complete genome. | entomopoxvirus | | |
| rxa01368 | 435 | GB_BA2: | 783 | AF164439 | Mycobacterium | Mycobacterium | 57,477 | 4-Aug-99 |
| | | AF164439 | | | smegmatis WhmD | smegmatis | | |
| | | | | | (whmD) gene, | | | |
| | | | | | complete cds; | | | |
| | | | | | and unknown gene. | | | |
| | | GB_BA1: | 1668 | AL021840 | Mycobacterium | Mycobacterium | 37,617 | 17-Jun-98 |
| | | MTV015 | | | tuberculosis | tuberculosis | | |
| | | | | | H37Rv | | | |
| | | | | | complete genome; | | | |
| | | | | | segment 140/162. | | | |
| | | GB_BA1: | 593 | X68708 | S. griseocarneum | Streptomyces | 53,396 | 17-Jan-94 |
| | | SGWHIB | | | whiB-Stv gene. | griseocarneus | | |
| rxa01375 | 1578 | GB_BA1: | 42729 | Z92771 | Mycobacterium | Mycobacterium | 52,638 | 10-Feb-99 |
| | | MTCY71 | | | tuberculosis H37Rv | tuberculosis | | |
| | | | | | complete genome; | | | |
| | | | | | segment 141/162. | | | |
| | | GB_IN2: | 29330 | AC005935 | Leishmania major | Leishmania | 39,777 | 15-Nov-99 |
| | | AC005935 | | | chromosome 3 | major | | |
| | | | | | clone L7234 | | | |
| | | | | | strain Friedlin, | | | |
| | | | | | complete sequence. | | | |
| | | GB_IN2: | 1962 | AF005195 | Trypanosoma cruzi | Trypanosoma | 40,304 | 17-Aug-98 |
| | | AF005195 | | | paraflagellar rod | cruzi | | |
| | | | | | component Par3 (par3b) | | | |
| | | | | | mRNA, complete cds. | | | |
| rxa01418 | 369 | GB_IN2: | 29535 | U42830 | Caenorhabditis elegans | Caenorhabditis | 34,375 | 03-MAR-1998 |
| | | CELC53B7 | | | cosmid C53B7. | elegans | | |
| | | GB_IN1: | 1118 | U49449 | Caenorhabditis elegans | Caenorhabditis | 47,111 | 17-MAY-1996 |
| | | CEU49449 | | | olfactory receptor | elegans | | |
| | | | | | Odr-10 (odr-10) mRNA, | | | |
| | | | | | complete cds. | | | |
| | | GB_EST35: | 295 | AI871077 | wI70c12.x1 | Homo sapiens | 37,722 | 30-Aug-99 |
| | | AI871077 | | | NCI_CGAP_Brn25 | | | |
| | | | | | Homo sapiens | | | |
| | | | | | cDNA clone | | | |
| | | | | | IMAGE: 2430262 3′ | | | |
| | | | | | similar to gb: | | | |
| | | | | | X70683_cds1 | | | |
| | | | | | SOX-4 PROTEIN | | | |
| | | | | | (HUMAN);, | | | |
| | | | | | mRNA sequence. | | | |
| rxa01450 | 687 | GB_BA1: | 67200 | AL021897 | Mycobacterium | Mycobacterium | 60,059 | 24-Jun-99 |
| | | MTV017 | | | tuberculosis H37Rv | tuberculosis | | |
| | | | | | complete genome; | | | |
| | | | | | segment 48/162. | | | |
| | | GB_BA1: | 4972 | X79027 | M. ammoniaphilum | Microbacterium | 39,912 | 20-Nov-96 |
| | | MAMAMIRM | | | genes mamIR | ammoniaphilum | | |
| | | | | | and mamIM. | | | |
| | | GB_HTG3: | 46469 | AC009121 | Homo sapiens | Homo sapiens | 55,507 | 3-Aug-99 |
| | | AC009121 | | | chromosome 16 clone | | | |
| | | | | | RPCI-11_485G7, | | | |
| | | | | | *** SEQUENCING IN | | | |
| | | | | | PROGRESS ***, | | | |
| | | | | | 32 unordered pieces. | | | |
| rxa01451 | 690 | GB_BA1: | 67200 | AL021897 | Mycobacterium | Mycobacterium | 63,516 | 24-Jun-99 |
| | | MTV017 | | | tuberculosis H37Rv | tuberculosis | | |
| | | | | | complete genome; | | | |
| | | | | | segment 48/162. | | | |
| | | GB_BA1: | 4972 | X79027 | M. ammoniaphilum | Microbacterium | 37,113 | 20-Nov-96 |
| | | MAMAMIRM | | | genes mamIR | ammoniaphilum | | |
| | | | | | and mamIM. | | | |
| | | GB_BA1: | 34714 | AL049491 | Mycobacterium leprae | Mycobacterium | 36,324 | 27-Aug-99 |
| | | MLCB1222 | | | cosmid B1222. | leprae | | |
| rxa01500 | 567 | GB_IN1: | 29688 | Z46791 | Caenorhabditis | Caenorhabditis | 36,298 | 2-Sep-99 |
| | | CEC09G5 | | | elegans | elegans | | |
| | | | | | cosmid C09G5, | | | |
| | | | | | complete sequence. | | | |
| | | GB_GSS9: | 390 | AQ096256 | HS_3037_A1_F11_MF CIT | Homo sapiens | 46,316 | 27-Aug-98 |
| | | AQ096256 | | | Approved Human | | | |
| | | | | | Genomic Sperm | | | |
| | | | | | Library D Homo | | | |
| | | | | | sapiens genomic | | | |
| | | | | | clone Plate = 3037 | | | |
| | | | | | Col = 21 | | | |
| | | | | | Row = K, | | | |
| | | | | | genomic | | | |
| | | | | | survey sequence. | | | |
| | | GB_HTG1: | 1301 | AL035456 | Homo sapiens | Homo sapiens | 39,388 | 23-Nov-99 |
| | | HS1099D15 | | | chromosome 20 clone | | | |
| | | | | | RP5-1099D15, | | | |
| | | | | | *** SEQUENCING IN | | | |
| | | | | | PROGRESS ***, | | | |
| | | | | | in unordered pieces. | | | |
| rxa01537 | 774 | GB_RO: | 2354 | X64589 | R. norvegicus mRNA | Rattus | 40,584 | 29-MAR-1994 |
| | | RNCYCBMR | | | for cyclin B. | norvegicus | | |
| | | GB_RO: | 1465 | L11995 | Rattus norvegicus | Rattus | 40,584 | 3-Feb-98 |
| | | RATCYCLINB | | | cyclin B mRNA, | norvegicus | | |
| | | | | | complete cds. | | | |
| | | GB_RO: | 1902 | X60768 | Rat mRNA for cyclin B. | Rattus | 40,530 | 15-Aug-96 |
| | | RNCYCLNB | | | | norvegicus | | |
| rxa01573 | 2205 | GB_HTG4: | 40524 | AC011317 | Homo sapiens | Homo sapiens | 34,814 | 21-OCT-1999 |
| | | AC011317 | | | chromosome 3 seeders | | | |
| | | | | | clone RPCI11-103G8, | | | |
| | | | | | ***SEQUENCING | | | |
| | | | | | IN PROGRESS ***, | | | |
| | | | | | 31 unordered pieces. | | | |
| | | GB_HTG4: | 40524 | AC011317 | Homo sapiens | Homo sapiens | 34,814 | 21-OCT-1999 |
| | | AC011317 | | | chromosome 3 seeders | | | |
| | | | | | clone RPCI1 1-103G8, | | | |
| | | | | | ***SEQUENCING IN | | | |
| | | | | | PROGRESS ***, | | | |
| | | | | | 31 unordered pieces. | | | |
| | | GB_IN1: | 24323 | AF039038 | Caenorhabditis elegans | Caenorhabditis | 38,899 | 1-Jan-98 |
| | | CELK06A5 | | | cosmid K06A5. | elegans | | |
| rxa01655 | 1482 | GB_GSS15: | 460 | AQ624398 | HS_2106_B2_C03_T7C CIT | Homo sapiens | 36,449 | 16-Jun-99 |
| | | AQ624398 | | | Approved Human | | | |
| | | | | | Genomic Sperm Library D | | | |
| | | | | | Homo sapiens | | | |
| | | | | | genomic clone | | | |
| | | | | | Plate = 2106 | | | |
| | | | | | Col = 6 | | | |
| | | | | | Row = F, genomic | | | |
| | | | | | survey sequence. | | | |
| | | GB_BA1: | 36734 | AL049497 | Streptomyces coelicolor | Streptomyces | 39,098 | 24-MAR-1999 |
| | | SC6G10 | | | cosmid 6G10. | coelicolor | | |
| | | GB_BA1: | 38859 | AL022602 | Mycobacterium leprae | Mycobacterium | 39,891 | 27-Aug-99 |
| | | MLCB268 | | | cosmid B268. | leprae | | |
| rxa01687 | | | | | | | | |
| rxa01759 | 885 | GB_OV: | 16201 | U11880 | Petromyzon marinus | Mitochondrion | 36,977 | 24-Sep-96 |
| | | PMU11880 | | | mitochondrion, | Petromyzon | | |
| | | | | | complete genome. | marinus | | |
| | | GB_STS: | 605 | G39160 | Z13915 Zebrafish AB | Danio rerio | 36,093 | 30-Jul-98 |
| | | G39160 | | | Danio rerio STS | | | |
| | | | | | genomic, sequence | | | |
| | | | | | tagged site. | | | |
| | | GB_STS: | 605 | G39160 | Z13915 Zebrafish AB | Danio rerio | 36,093 | 30-Jul-98 |
| | | G39160 | | | Danio rerio STS | | | |
| | | | | | genomic, sequence | | | |
| | | | | | tagged site. | | | |
| rxa01763 | 588 | GB_GSS4: | 454 | AQ701186 | HS_2129_A2_D04_T7C | Homo sapiens | 40,000 | 7-Jul-99 |
| | | AQ701186 | | | CIT Approved | | | |
| | | | | | Human Genomic Sperm | | | |
| | | | | | Library D | | | |
| | | | | | Homo sapiens genomic | | | |
| | | | | | clone Plate = | | | |
| | | | | | 2129 Col = 8 | | | |
| | | | | | Row = G, | | | |
| | | | | | genomic survey | | | |
| | | | | | sequence. | | | |
| | | GB_BA1: | 5363 | D28859 | Enterococcus faecalis | Enterococcus | 37,117 | 7-Feb-99 |
| | | ENEPPD1 | | | Plasmid pPD1 | faecalis | | |
| | | | | | DNA for iPD1, TraB, | | | |
| | | | | | TraA, ORF1 and | | | |
| | | | | | TraC, complete cds. | | | |
| | | GB_BA1: | 8526 | D78016 | Enterococcus faecalis | Enterococcus | 35,788 | 5-Feb-99 |
| | | ENEPPD1A | | | Plasmid pPD1 genes | faecalis | | |
| | | | | | for REPB, REPA, TRAC, | | | |
| | | | | | TRAB, TRAA, iPD1, | | | |
| | | | | | TRAE, TRAF, complete | | | |
| | | | | | cds and partial cds. | | | |
| rxa01826 | 2061 | GB_BA1: | 37821 | Z70722 | Mycobacterium leprae | Mycobacterium | 37,524 | 29-Aug-97 |
| | | MLCB1770 | | | cosmid B1770. | leprae | | |
| | | GB_BA1: | 35824 | AL079308 | Streptomyces coelicolor | Streptomyces | 51,185 | 15-Jun-99 |
| | | SCH69 | | | cosmid H69. | coelicolor | | |
| | | GB_BA1: | 33779 | AL096822 | Streptomyces coelicolor | Streptomyces | 38,775 | 8-Jul-99 |
| | | SCGD3 | | | cosmid GD3. | coelicolor | | |
| rxa01827 | 1530 | GB_BA1: | 39160 | Z80233 | Mycobacterium | Mycobacterium | 37,815 | 17-Jun-98 |
| | | MTCY10H4 | | | tuberculosis H37Rv | tuberculosis | | |
| | | | | | complete genome; | | | |
| | | | | | segment 2/162. | | | |
| | | GB_BA1: | 2711 | AB016932 | Streptomyces | Streptomyces | 42,543 | 11-Nov-98 |
| | | AB016932 | | | coelicolor gene for | coelicolor | | |
| | | | | | protein serine/ | | | |
| | | | | | threonine kinase, | | | |
| | | | | | complete cds. | | | |
| | | GB_RO: | 2201 | AF145705 | Mus musculus T2K | Mus musculus | 40,438 | 2-Jun-99 |
| | | AF145705 | | | protein kinase | | | |
| | | | | | homolog mRNA, | | | |
| | | | | | complete cds. | | | |
| rxa01830 | 1476 | GB_PR2: | 156854 | U82672 | Human chromosome X | Homo sapiens | 36,389 | 12-MAY-1997 |
| | | HSU82672 | | | clone Qc15B1, | | | |
| | | | | | complete sequence. | | | |
| | | GB_BA2: | 26245 | AF087482 | Pseudomonas | Pseudomonas | 40,805 | 31-OCT-1998 |
| | | AF087482 | | | aeruginosa | aeruginosa | | |
| | | | | | cIcC and ohbH genes, | | | |
| | | | | | Lys-R type regulatory | | | |
| | | | | | protein | | | |
| | | | | | (clcR), chlorocatechol- | | | |
| | | | | | 1,2-dioxygenase | | | |
| | | | | | (clcA), chloromuconate | | | |
| | | | | | cycloisomerase | | | |
| | | | | | (clcB), dienelactone | | | |
| | | | | | hydrolase (clcD), | | | |
| | | | | | maleylacetate | | | |
| | | | | | reductase (clcE), | | | |
| | | | | | transposase (tnpA), | | | |
| | | | | | ATP-binding protein | | | |
| | | | | | (tnpB), putative | | | |
| | | | | | regulatory protein | | | |
| | | | | | (ohbR), | | | |
| | | | | | o-halobenzoate | | | |
| | | | | | dioxygenase | | | |
| | | | | | reductase (ohbA), | | | |
| | | | | | o-halobenzoate | | | |
| | | | | | dioxygenase alpha | | | |
| | | | | | subunit (ohbB), | | | |
| | | | | | o-halobenzoate | | | |
| | | | | | dioxygenase | | | |
| | | | | | beta subunit (ohbC), | | | |
| | | | | | o-halobenzoate | | | |
| | | | | | dioxygenase | | | |
| | | | | | ferredoxin (ohbD), | | | |
| | | | | | putative membrane | | | |
| | | | | | spanning protein | | | |
| | | | | | (ohbE), ATP-binding | | | |
| | | | | | protein (ohbF), | | | |
| | | | | | putative substrate | | | |
| | | | | | binding protein | | | |
| | | | | | (ohbG), and putative | | | |
| | | | | | dioxygenase genes, | | | |
| | | | | | complete cds; and | | | |
| | | | | | unknown gene. | | | |
| | | GB_PR2: | 156854 | U82672 | Human chromosome X | Homo sapiens | 36,301 | 12-MAY-1997 |
| | | HSU82672 | | | clone Qc15B1, | | | |
| | | | | | complete sequence. | | | |
| rxa01836 | 828 | GB_GSS1: | 704 | AJ227010 | Ciona intestinalis | Ciona | 33,481 | 10-MAR-1998 |
| | | CI22H2 | | | genomic fragment, | intestinalis | | |
| | | | | | clone 22H2, genomic | | | |
| | | | | | survey sequence. | | | |
| | | GB_EST18: | 461 | AA692868 | vr58h12.s1 Knowles | Mus musculus | 47,222 | 16-DEC-1997 |
| | | AA692868 | | | Solter mouse 2 cell | | | |
| | | | | | Mus musculus | | | |
| | | | | | cDNA clone IMAGE: | | | |
| | | | | | 1124903 5′, | | | |
| | | | | | mRNA sequence. | | | |
| | | GB_PR3: | 156791 | AL049594 | Human DNA sequence from | Homo sapiens | 35,504 | 23-Nov-99 |
| | | HSDJ860P4 | | | clone 860P4 on | | | |
| | | | | | chromosome 20 | | | |
| | | | | | Contains ESTs, | | | |
| | | | | | STSs, GSSs and a | | | |
| | | | | | CpG island, | | | |
| | | | | | complete sequence. | | | |
| rxa01840 | 654 | GB_BA1: | 145709 | D90914 | Synechocystis sp. | Synechocystis | 61,315 | 7-Feb-99 |
| | | D90914 | | | PCC6803 complete | sp. | | |
| | | | | | genome, 16/27, | | | |
| | | | | | 1991550-2137258. | | | |
| | | GB_EST25: | 306 | AU041657 | AU041657 Mouse | Mus musculus | 39,216 | 04-DEC-1998 |
| | | AU041657 | | | four-cell- | | | |
| | | | | | embryo cDNA | | | |
| | | | | | Mus musculus cDNA | | | |
| | | | | | clone J1007D01 | | | |
| | | | | | 3′, mRNA sequence. | | | |
| | | GB_PL2: | 474 | U82633 | Alternaria alternata | Alternaria | 45,092 | 13-Jan-97 |
| | | AAU82633 | | | Alt a I subunit | alternata | | |
| | | | | | mRNA, complete cds. | | | |
| rxa01860 | 1008 | GB_PL2: | 97789 | AC004255 | Arabidopsis thaliana | Arabidopsis | 35,939 | 16-Apr-98 |
| | | AC004255 | | | BAC T1F9 chromosome | thaliana | | |
| | | | | | 1, complete sequence. | | | |
| | | GB_BA1: | 213190 | Z99107 | Bacillus subtilis | Bacillus | 37,111 | 26-NOV-97 |
| | | BSUB0004 | | | complete genome | subtilis | | |
| | | | | | (section 4 of 21): | | | |
| | | | | | from 600701 to 813890. | | | |
| | | GB_BA1: | 20341 | D86418 | Bacillus subtilis | Bacillus | 38,352 | 7-Feb-99 |
| | | D86418 | | | genomic DNA 69-70 | subtilis | | |
| | | | | | degree region, | | | |
| | | | | | partial sequence. | | | |
| rxa01861 | 2088 | GB_HTG4: | 173517 | AC009949 | Homo sapiens chromosome | Homo sapiens | 36,544 | 29-OCT-1999 |
| | | AC009949 | | | unknown clone | | | |
| | | | | | NH0069J07, | | | |
| | | | | | WORKING DRAFT | | | |
| | | | | | SEQUENCE, in | | | |
| | | | | | unordered pieces. | | | |
| | | GB_HTG4: | 173517 | AC009949 | Homo sapiens chromosome | Homo sapiens | 36,544 | 29-OCT-1999 |
| | | AC009949 | | | unknown clone | | | |
| | | | | | NH0069J07, | | | |
| | | | | | WORKING DRAFT | | | |
| | | | | | SEQUENCE, | | | |
| | | | | | in unordered pieces. | | | |
| | | GB_HTG4: | 173517 | AC009949 | Homo sapiens chromosome | Homo sapiens | 35,676 | 29-OCT-1999 |
| | | AC009949 | | | unknown clone | | | |
| | | | | | NH0069J07, | | | |
| | | | | | WORKING DRAFT | | | |
| | | | | | SEQUENCE, | | | |
| | | | | | in unordered pieces. | | | |
| rxa01898 | 816 | GB_HTG1: | 293827 | AL021151 | Caenorhabditis elegans | Caenorhabditis | 33,250 | 1-Apr-99 |
| | | CEY48B6 | | | chromosome II | elegans | | |
| | | | | | clone Y48B6, | | | |
| | | | | | *** SEQUENCING IN | | | |
| | | | | | PROGRESS ***, | | | |
| | | | | | in unordered pieces. | | | |
| | | GB_HTG1: | 293827 | AL021151 | Caenorhabditis elegans | Caenorhabditis | 33,250 | 1-Apr-99 |
| | | CEY48B6 | | | chromosome II | elegans | | |
| | | | | | clone Y48B6, | | | |
| | | | | | *** SEQUENCING IN | | | |
| | | | | | PROGRESS ***, | | | |
| | | | | | in unordered pieces. | | | |
| | | GB_HTG1: | 110000 | Z92860 | Caenorhabditis elegans | Caenorhabditis | 34,766 | Z92860 |
| | | CEY53F4_2 | | | chromosome II | elegans | | |
| | | | | | clone Y53F4, | | | |
| | | | | | *** SEQUENCING IN | | | |
| | | | | | PROGRESS ***, | | | |
| | | | | | in unordered pieces. | | | |
| rxa01935 | 1287 | GB_PR3: | 48084 | AL080273 | Human DNA sequence from | Homo sapiens | 38,661 | 23-Nov-99 |
| | | HSBA259P1 | | | clone 259P1 on | | | |
| | | | | | chromosome 22. | | | |
| | | | | | Contains STSs, | | | |
| | | | | | GSSs, genomic | | | |
| | | | | | markers D22S1154, | | | |
| | | | | | D22S310 and D22S690, | | | |
| | | | | | and a gt repeat | | | |
| | | | | | polymorphism, | | | |
| | | | | | complete sequence. | | | |
| | | GB_BA1: | 2862 | M19019 | R. fredii host-inducible | Sinorhizobium | 37,007 | 26-Apr-93 |
| | | RHMIND | | | protein genes | fredii | | |
| | | | | | A and B, complete cds. | | | |
| | | GB_BA2: | 10894 | AE000108 | Rhizobium sp. | Rhizobium | 37,322 | 12-DEC-1997 |
| | | AE000108 | | | NGR234 plasmid | sp. NGR234 | | |
| | | | | | pNGR234a, section | | | |
| | | | | | 45 of 46 | | | |
| | | | | | of the complete | | | |
| | | | | | plasmid sequence. | | | |
| rxa02127 | 777 | GB_BA1: | 143051 | D90911 | Synechocystis sp. | Synechocystis | 35,480 | 7-Feb-99 |
| | | D90911 | | | PCC6803 complete | sp. | | |
| | | | | | genome, 13/27, | | | |
| | | | | | 1576593-1719643. | | | |
| | | GB_PR2: | 124095 | AC002477 | Human PAC clone | Homo sapiens | 35,409 | 22-Aug-97 |
| | | AC002477 | | | DJ327A19 | | | |
| | | | | | from Xq25-q26, | | | |
| | | | | | complete sequence. | | | |
| | | GB_PR2: | 124095 | AC002477 | Human PAC clone | Homo sapiens | 38,536 | 22-Aug-97 |
| | | AC002477 | | | DJ327A19 | | | |
| | | | | | from Xq25-q26, | | | |
| | | | | | complete sequence. | | | |
| rxa02210 | 687 | GB_BA1: | 2995 | AB025424 | Corynebacterium | Corynebacterium | 100,000 | 3-Apr-99 |
| | | AB025424 | | | glutamicum | glutamicum | | |
| | | | | | gene for aconitase, | | | |
| | | | | | partial cds. | | | |
| | | GB_EST15: | 490 | AA534896 | nf78e02.s1 NCI_{—} | Homo sapiens | 38,929 | 21-Aug-97 |
| | | AA534896 | | | CGAP_Co3 | | | |
| | | | | | Homo sapiens | | | |
| | | | | | cDNA clone IMAGE: | | | |
| | | | | | 926042 3′, | | | |
| | | | | | mRNA sequence. | | | |
| | | GB_BA1: | 2995 | AB025424 | Corynebacterium | Corynebacterium | 41,119 | 3-Apr-99 |
| | | AB025424 | | | glutamicum | glutamicum | | |
| | | | | | gene for aconitase, | | | |
| | | | | | partial cds. | | | |
| rxa02232 | 1650 | GB_BA1: | 13935 | Z98209 | Mycobacterium | Mycobacterium | 38,882 | 17-Jun-98 |
| | | MTCY154 | | | tuberculosis H37Rv | tuberculosis | | |
| | | | | | complete genome; | | | |
| | | | | | segment 121/162. | | | |
| | | GB_BA1: | 40221 | AD000002 | Mycobacterium | Mycobacterium | 56,593 | 03-DEC-1996 |
| | | MSGY154 | | | tuberculosis | tuberculosis | | |
| | | | | | sequence from | | | |
| | | | | | clone y154. | | | |
| | | GB_BA1: | 38400 | AL022268 | Streptomyces | Streptomyces | 55,569 | 6-Apr-98 |
| | | SC4H2 | | | coelicolor | coelicolor | | |
| | | | | | cosmid 4H2. | | | |
| rxa02270 | 744 | GB_BA1: | 217000 | AP000004 | Pyrococcus | Pyrococcus | 36,190 | 8-Feb-99 |
| | | AP000004 | | | horikoshii OT3 | horikoshii | | |
| | | | | | genomic DNA, | | | |
| | | | | | 777001-994000 | | | |
| | | | | | nt. position (4/7). | | | |
| | | GB_BA1: | 217000 | AP000004 | Pyrococcus | Pyrococcus | 36,951 | 8-Feb-99 |
| | | AP000004 | | | horikoshii OT3 | horikoshii | | |
| | | | | | genomic DNA, | | | |
| | | | | | 777001-994000 nt. | | | |
| | | | | | position (4/7). | | | |
| | | GB_HTG3: | 199233 | AC008403 | Homo sapiens | Homo sapiens | 38,420 | 3-Aug-99 |
| | | AC008403 | | | chromosome 19 clone | | | |
| | | | | | CIT-HSPC_273B12, | | | |
| | | | | | *** SEQUENCING | | | |
| | | | | | IN PROGRESS ***, | | | |
| | | | | | 82 unordered pieces. | | | |
| rxa02306 | 414 | GB_EST8: | 313 | AA011641 | zi02e11.s1 | Homo sapiens | 35,235 | 09-MAY-1997 |
| | | AA011641 | | | Soares_fetal_liver_{—} | | | |
| | | | | | spleen_1NFLS_S1 | | | |
| | | | | | Homo sapiens cDNA clone | | | |
| | | | | | IMAGE: 429644 3′, | | | |
| | | | | | mRNA sequence. | | | |
| | | GB_GSS1: | 527 | AL081678 | Arabidopsis thaliana | Arabidopsis | 40,615 | 28-Jun-99 |
| | | CNSOONAO | | | genome survey | thaliana | | |
| | | | | | sequence SP6 end of | | | |
| | | | | | BAC F3H19 of IGF | | | |
| | | | | | library from strain | | | |
| | | | | | Columbia of | | | |
| | | | | | Arabidopsis thaliana, | | | |
| | | | | | genomic | | | |
| | | | | | survey sequence. | | | |
| | | GB_EST24: | 494 | C97772 | C97772 Rice callus | Oryza sativa | 36,667 | 19-OCT-1998 |
| | | C97772 | | | Oryza sativa cDNA | | | |
| | | | | | clone C62702_6Z, | | | |
| | | | | | mRNA sequence. | | | |
| rxa02365 | 1968 | GB_BA1: | 42931 | U00016 | Mycobacterium leprae | Mycobacterium | 67,483 | 01-MAR-1994 |
| | | U00016 | | | cosmid B1937. | leprae | | |
| | | GB_BA1: | 41230 | Z81368 | Mycobacterium | Mycobacterium | 37,888 | 17-Jun-98 |
| | | MTCY253 | | | tuberculosis H37Rv | tuberculosis | | |
| | | | | | complete genome; | | | |
| | | | | | segment 106/162. | | | |
| | | GB_BA1: | 282700 | D84432 | Bacillus subtilis DNA, | Bacillus | 58,496 | 6-Feb-99 |
| | | BACJH642 | | | 283 Kb region | subtilis | | |
| | | | | | containing skin element. | | | |
| rxa02376 | 1626 | GB_BA2: | 3005 | U31230 | Corynebacterium | Corynebacterium | 97,504 | 2-Aug-96 |
| | | CGU31230 | | | glutamicum | glutamicum | | |
| | | | | | Obg protein homolog | | | |
| | | | | | gene, partial cds, | | | |
| | | | | | gamma glutamyl | | | |
| | | | | | kinase (proB) gene, | | | |
| | | | | | complete cds, and | | | |
| | | | | | (unkdh) gene, | | | |
| | | | | | complete cds. | | | |
| | | GB_BA1: | 1647 | D87915 | Streptomyces | Streptomyces | 58,013 | 7-Feb-99 |
| | | D87915 | | | coelicolor | coelicolor | | |
| | | | | | DNA for Obg, | | | |
| | | | | | complete cds. | | | |
| | | GB_BA1: | 53662 | AL021841 | Mycobacterium | Mycobacterium | 38,051 | 23-Jun-99 |
| | | MTV016 | | | tuberculosis H37Rv | tuberculosis | | |
| | | | | | complete genome; | | | |
| | | | | | segment 143/162. | | | |
| rxa02450 | 678 | GB_BA2: | 12391 | AE000654 | Helicobacter pylori | Helicobacter | 36,269 | 6-Apr-99 |
| | | AE000654 | | | 26695 section | pylori 26695 | | |
| | | | | | 132 of 134 of the | | | |
| | | | | | complete genome. | | | |
| | | GB_HTG3: | 165826 | AC009298 | Homo sapiens clone | Homo sapiens | 35,886 | 13-Aug-99 |
| | | AC009298 | | | NH0017I06, | | | |
| | | | | | *** SEQUENCING | | | |
| | | | | | IN PROGRESS ***, | | | |
| | | | | | 2 unordered pieces. | | | |
| | | GB_HTG4: | 110000 | AC010187_ | Homo sapiens | Homo sapiens | 38,939 | AC010187 |
| | | AC010187 | | | chromosome 3 seeders | | | |
| | | 2 | | | clone RPCI11-389O9, | | | |
| | | | | | ***SEQUENCING | | | |
| | | | | | IN PROGRESS ***, | | | |
| | | | | | 164 unordered pieces. | | | |
| rxa02493 | 1362 | GB_BA1: | 2339 | X93514 | C. glutamicum betP gene. | Corynebacterium | 38,346 | 8-Sep-97 |
| | | CGBETPGEN | | | | glutamicum | | |
| | | GB_BA1: | 107379 | X86780 | S. hygroscopicus gene | Streptomyces | 42,556 | 16-Aug-96 |
| | | SHGCPIR | | | cluster for polyketide | hygroscopicus | | |
| | | | | | immunosuppressant | | | |
| | | | | | rapamycin. | | | |
| | | GB_HTG2: | 138793 | AC007084 | Drosophila melanogaster | Drosophila | 35,985 | 2-Aug-99 |
| | | AC007084 | | | chromosome 2 clone | melanogaster | | |
| | | | | | BACR26A16 (D577) RPCI-98 | | | |
| | | | | | 26.A.16 map 43F-44A | | | |
| | | | | | strain y; cn bw sp, | | | |
| | | | | | *** SEQUENCING | | | |
| | | | | | IN PROGRESS***, | | | |
| | | | | | 19 unordered pieces. | | | |
| rxa02494 | 819 | GB_BA1: | 42991 | U00018 | Mycobacterium leprae | Mycobacterium | 42,105 | 01-MAR-1994 |
| | | U00018 | | | cosmid B2168. | leprae | | |
| | | GB_BA1: | 37218 | Z77162 | Mycobacterium | Mycobacterium | 64,552 | 17-Jun-98 |
| | | MTCY20G9 | | | tuberculosis H37Rv | tuberculosis | | |
| | | | | | complete genome; | | | |
| | | | | | segment 25/162. | | | |
| | | GB_BA1: | 3208 | Y13627 | Mycobacterium bovis | Mycobacterium | 64,428 | 6-Jan-98 |
| | | MBY13627 | | | BCG senX3, | bovis BCG | | |
| | | | | | regX3 genes. | | | |
| rxa02631 | 1488 | GB_EST17: | 468 | AA655226 | vq84a10.s1 Knowles | Mus musculus | 36,052 | 4-Nov-97 |
| | | AA655226 | | | Solter mouse 2 cell | | | |
| | | | | | Mus musculus cDNA clone | | | |
| | | | | | IMAGE: 1108986 5′ | | | |
| | | | | | similar to gb: | | | |
| | | | | | J03827 Y BOX | | | |
| | | | | | BINDING PROTEIN-1 | | | |
| | | | | | (HUMAN); gb: M62867 | | | |
| | | | | | Mouse Y box | | | |
| | | | | | transcription factor | | | |
| | | | | | (MOUSE);, mRNA | | | |
| | | | | | sequence. | | | |
| | | GB_GSS1: | 898 | AL101527 | Drosophila melanogaster | Drosophila | 34,449 | 26-Jul-99 |
| | | CNS012GD | | | genome survey | melanogaster | | |
| | | | | | sequence T7 end of BAC | | | |
| | | | | | BACN07L05 of DrosBAC | | | |
| | | | | | library from | | | |
| | | | | | Drosophila melanogaster | | | |
| | | | | | (fruit fly), | | | |
| | | | | | genomic survey sequence. | | | |
| | | GB_GSS3: | 1137 | B10133 | F2H22-T7 IGF | Arabidopsis | 38,011 | 14-MAY-1997 |
| | | B10133 | | | Arabidopsis thaliana | thaliana | | |
| | | | | | genomic clone F2H22, | | | |
| | | | | | genomic survey | | | |
| | | | | | sequence. | | | |
| rxa02632 | 819 | GB_BA1: | 36850 | Z80226 | Mycobacterium | Mycobacterium | 50,124 | 17-Jun-98 |
| | | MTCY369 | | | tuberculosis | tuberculosis | | |
| | | | | | H37Rv complete genome; | | | |
| | | | | | segment 36/162. | | | |
| | | GB_BA1: | 480 | S76966 | {BCG2 insert site} | Mycobacterium | 39,437 | 27-Jul-95 |
| | | S76966 | | | [Mycobacterium | tuberculosis | | |
| | | | | | tuberculosis, | | | |
| | | | | | BCG Japan, IS6110/IS986, | | | |
| | | | | | Insertion, 480 nt]. | | | |
| | | GB_PR3: | 188362 | AC005019 | Homo sapiens BAC clone | Homo sapiens | 36,763 | 27-Aug-98 |
| | | AC005019 | | | GS250A16 from 7p21-p22, | | | |
| | | | | | complete sequence. | | | |
| rxa02667 | 717 | GB_BA1: | 40806 | AD000016 | Mycobacterium | Mycobacterium | 55,742 | 10-DEC-1996 |
| | | MSGY23 | | | tuberculosis | tuberculosis | | |
| | | | | | sequence from clone y23. | | | |
| | | GB_BA1: | 8189 | AL022075 | Mycobacterium | Mycobacterium | 39,474 | 17-Jun-98 |
| | | MTV024 | | | tuberculosis H37Rv | tuberculosis | | |
| | | | | | complete genome; | | | |
| | | | | | segment 151/162. | | | |
| | | GB_BA1: | 38065 | AL035159 | Mycobacterium | Mycobacterium | 39,898 | 27-Aug-99 |
| | | MLCB1450 | | | leprae cosmid B1450. | leprae | | |
| rxa02668 | 846 | GB_HTG2: | 158262 | AC007739 | Homo sapiens clone | Homo sapiens | 38,659 | 5-Jun-99 |
| | | AC007739 | | | NH0091L03, | | | |
| | | | | | *** SEQUENCING | | | |
| | | | | | IN PROGRESS ***, | | | |
| | | | | | 4 unordered pieces. | | | |
| | | GB_HTG2: | 158262 | AC007739 | Homo sapiens clone | Homo sapiens | 38,659 | 5-Jun-99 |
| | | AC007739 | | | NH0091L03, | | | |
| | | | | | *** SEQUENCING | | | |
| | | | | | IN PROGRESS ***, | | | |
| | | | | | 4 unordered pieces. | | | |
| | | GB_EST24: | 443 | AI90741 | qd61a09.x1 Soares_{—} | Homo sapiens | 39,661 | 28-OCT-1998 |
| | | AI90741 | | | testis_NHT | | | |
| | | | | | Homo sapiens cDNA | | | |
| | | | | | clone IMAGE: | | | |
| | | | | | 1733944 3′, | | | |
| | | | | | mRNA sequence. | | | |
| rxa02669 | 1239 | GB_HTG2: | 158262 | AC007739 | Homo sapiens clone | Homo sapiens | 36,230 | 5-Jun-99 |
| | | AC007739 | | | NH0091L03, | | | |
| | | | | | *** SEQUENCING | | | |
| | | | | | IN PROGRESS ***, | | | |
| | | | | | 4 unordered pieces. | | | |
| | | GB_HTG2: | 158262 | AC007739 | Homo sapiens clone | Homo sapiens | 36,230 | 5-Jun-99 |
| | | AC007739 | | | NH0091L03, | | | |
| | | | | | *** SEQUENCING | | | |
| | | | | | IN PROGRESS ***, | | | |
| | | | | | 4 unordered pieces. | | | |
| | | GB_GSS9: | 425 | AQ128685 | HS_3026_B2_D10_MR | Homo sapiens | 36,235 | 23-Sep-98 |
| | | AQ128685 | | | CIT Approved | | | |
| | | | | | Human Genomic Sperm | | | |
| | | | | | Library D | | | |
| | | | | | Homo sapiens genomic | | | |
| | | | | | clone | | | |
| | | | | | Plate = 3026 | | | |
| | | | | | Col = 20 | | | |
| | | | | | Row = H, | | | |
| | | | | | genomic survey | | | |
| | | | | | sequence. | | | |
| rxa02698 | 492 | GB_EST18: | 398 | AA704727 | zj21f05.s1 | Homo sapiens | 40,470 | 24-DEC-1997 |
| | | AA704727 | | | Soares_fetal_{—} | | | |
| | | | | | liver_spleen_{—} | | | |
| | | | | | 1NFLS_S1 | | | |
| | | | | | Homo sapiens cDNA clone | | | |
| | | | | | IMAGE: 450945 3′, | | | |
| | | | | | mRNA sequence. | | | |
| | | GB_PR2: | 75698 | AP000228 | Homo sapiens | Homo sapiens | 42,616 | 20-Nov-99 |
| | | AP000228 | | | genomic DNA, | | | |
| | | | | | chromosome 21q21.2, | | | |
| | | | | | LL56-APP region, | | | |
| | | | | | clone: R49K20, | | | |
| | | | | | complete sequence. | | | |
| | | GB_PR2: | 100000 | AP000140 | Homo sapiens | Homo sapiens | 42,616 | 20-NOV-99 |
| | | AP000140 | | | genomic DNA, | | | |
| | | | | | chromosome 21q21.2, | | | |
| | | | | | LL56-APP region, clone | | | |
| | | | | | B2291C14-R44F3, | | | |
| | | | | | segment 5/10, | | | |
| | | | | | complete sequence. | | | |
| rxa02699 | 2271 | GB_GSS12: | 497 | AQ364540 | nbxb0061O09r CUGI | Oryza sativa | 37,903 | 3-Feb-99 |
| | | AQ364540 | | | Rice BAC Library | | | |
| | | | | | Oryza sativa genomic | | | |
| | | | | | clone nbxb0061O09r, | | | |
| | | | | | genomic | | | |
| | | | | | survey sequence. | | | |
| | | GB_PR4: | 141509 | AC006044 | Homo sapiens BAC clone | Homo sapiens | 36,360 | 18-MAR-1999 |
| | | AC006044 | | | NH0539B24 from | | | |
| | | | | | 7p15.1-p14, | | | |
| | | | | | complete sequence. | | | |
| | | GB_PR2: | 91526 | AF001552 | Homo sapiens | Homo sapiens | 35,352 | 21-Aug-97 |
| | | HSAF001552 | | | chromosome 16 BAC | | | |
| | | | | | clone CIT987SK-381E11 | | | |
| | | | | | complete sequence. | | | |
| rxa02724 | 967 | GB_HTG2: | 167079 | AL096814 | Homo sapiens | Homo sapiens | 36,820 | 03-DEC-1999 |
| | | HSDJ139D8 | | | chromosome 6 clone | | | |
| | | | | | RP1-139D8 map | | | |
| | | | | | p12.1-21.1, | | | |
| | | | | | *** SEQUENCING | | | |
| | | | | | IN PROGRESS ***, | | | |
| | | | | | in unordered pieces. | | | |
| | | GB_HTG2: | 167079 | AL096814 | Homo sapiens | Homo sapiens | 36,820 | 03-DEC-1999 |
| | | HSDJ139D8 | | | chromosome 6 clone | | | |
| | | | | | RP1-139D8 map | | | |
| | | | | | p12.1-21.1, | | | |
| | | | | | ***SEQUENCING | | | |
| | | | | | IN PROGRESS ***, | | | |
| | | | | | in unordered pieces. | | | |
| | | GB_BA1: | 5461 | AB015853 | Pseudomonas | Pseudomonas | 39,121 | 13-Nov-98 |
| | | AB015853 | | | aeruginosa gene for | aeruginosa | | |
| | | | | | MexX and MexY, | | | |
| | | | | | complete cds. | | | |
| rxa02747 | 2199 | GB_BA1: | 5368 | AJ010319 | Corynebacterium | Corynebacterium | 100,000 | 14-MAY-1999 |
| | | CAJ10319 | | | glutamicum amtP, | glutamicum | | |
| | | | | | glnB, glnD genes | | | |
| | | | | | and partial ftsY | | | |
| | | | | | and srp genes. | | | |
| | | GB_GSS13: | 463 | AQ463737 | HS_5051_B2_D05_{—} | Homo sapiens | 37,549 | 23-Apr-99 |
| | | AQ463737 | | | SP6E RPCI-11 Human | | | |
| | | | | | Male BAC Library | | | |
| | | | | | Homo sapiens | | | |
| | | | | | genomic clone | | | |
| | | | | | Plate = | | | |
| | | | | | 627 Col = 10 | | | |
| | | | | | Row = H, | | | |
| | | | | | genomic survey | | | |
| | | | | | sequence. | | | |
| | | GB_BA1: | 5368 | AJ010319 | Corynebacterium | Corynebacterium | 100,000 | 14-MAY-1999 |
| | | CAJ10319 | | | glutamicum | glutamicum | | |
| | | | | | amtP, glnB, glnD | | | |
| | | | | | genes and | | | |
| | | | | | partial ftsY | | | |
| | | | | | and srp genes. | | | |
| rxa02760 | 1077 | GB_IN2: | 84551 | AC004295 | Drosophila | Drosophila | 40,303 | 29-Jul-98 |
| | | AC004295 | | | melanogaster DNA | melanogaster | | |
| | | | | | sequence | | | |
| | | | | | (P1 DS08374 (D180)), | | | |
| | | | | | complete sequence. | | | |
| | | GB_HTG6: | 141830 | AC011647 | Homo sapiens clone | Homo sapiens | 38,158 | 04-DEC-1999 |
| | | AC011647 | | | RP11-15D18, | | | |
| | | | | | ***SEQUENCING | | | |
| | | | | | IN PROGRESS ***, | | | |
| | | | | | 29 unordered pieces. | | | |
| | | GB_HTG6: | 141830 | AC011647 | Homo sapiens clone | Homo sapiens | 36,321 | 04-DEC-1999 |
| | | AC011647 | | | RP11-15D18, | | | |
| | | | | | ***SEQUENCING | | | |
| | | | | | IN PROGRESS ***, | | | |
| | | | | | 29 unordered pieces. | | | |
| rxa02787 | 1500 | GB_BA1: | 38807 | AL023591 | Mycobacterium | Mycobacterium | 57,533 | 27-Aug-99 |
| | | MLCB1259 | | | leprae cosmid B1259. | leprae | | |
| | | GB_BA1: | 38914 | L78820 | Mycobacterium | Mycobacterium | 57,600 | 15-Jun-96 |
| | | MSGB937CS | | | leprae cosmid B937 | leprae | | |
| | | | | | DNA sequence. | | | |
| | | GB_PR4: | 69718 | AC006474 | Homo sapiens clone | Homo sapiens | 37,246 | 1-Jul-99 |
| | | AC006474 | | | DJ0669I17, | | | |
| | | | | | complete sequence. | | | |
| rxa02830 | 662 | GB_BA1: | 31859 | Z83866 | Mycobacterium | Mycobacterium | 41,527 | 17-Jun-98 |
| | | MTCY22D7 | | | tuberculosis H37Rv | tuberculosis | | |
| | | | | | complete genome; | | | |
| | | | | | segment 133/162. | | | |
| | | GB_BA1: | 31859 | 283866 | Mycobacterium | Mycobacterium | 41,223 | 17-Jun-98 |
| | | MTCY22D7 | | | tuberculosis H37Rv | tuberculosis | | |
| | | | | | complete genome; | | | |
| | | | | | segment 133/162. | | | |
| | | GB_EST12: | 440 | AA276025 | vc30a07.r1 | Mus musculus | 38,746 | 1-Apr-97 |
| | | AA276025 | | | Barstead MPLRB1 | | | |
| | | | | | Mus musculus | | | |
| | | | | | cDNA clone IMAGE: | | | |
| | | | | | 776052 5′ | | | |
| | | | | | similar to gb: L38607 | | | |
| | | | | | Mus musculus | | | |
| | | | | | (MOUSE);, | | | |
| | | | | | mRNA sequence. | | | |
| rxa02831 | | | | | | | | |
| rxs03200 | 759 | GB_IN2: | 268984 | AE001274 | Leishmania major | Leishmania | 38,575 | 24-MAR-1999 |
| | | AE001274 | | | chromosome 1, | major | | |
| | | | | | complete sequence. | | | |
| | | GB_IN2: | 268984 | AE001274 | Leishmania major | Leishmania | 36,772 | 24-MAR-1999 |
| | | AE001274 | | | chromosome 1, | major | | |
| | | | | | complete sequence. | | | |
| | | GB_OM: | 5568 | X53085 | S. scrofa DNA for | Sus scrofa | 33,515 | 28-Jul-95 |
| | | SSIFNG | | | interferon-gamma. | | | |
| rxs03208 | 565 | GB_BA1: | 1091 | L35906 | Corynebacterium | Brevibacterium | 99,646 | 06-MAR-1996 |
| | | BRLDTXR | | | glutamicum | lactofermentum | | |
| | | | | | (clone pULJSX4) | | | |
| | | | | | diphtheria toxin | | | |
| | | | | | repressor (dtxr) gene, | | | |
| | | | | | complete cds. | | | |
| | | GB_BA1: | 38631 | Z96072 | Mycobacterium | Mycobacterium | 61,062 | 17-Jun-98 |
| | | MTCY05A6 | | | tuberculosis H37Rv | tuberculosis | | |
| | | | | | complete genome; | | | |
| | | | | | segment 120/162. | | | |
| | | GB_BA1: | 2604 | M80338 | Corynebacterium | Corynebacterium | 66,372 | 26-Apr-93 |
| | | CORDTXRAA | | | diphtheriae | diphtheriae | | |
| | | | | | diphtheria toxin | | | |
| | | | | | repressor (dtxR) | | | |
| | | | | | gene, complete | | | |
| | | | | | cds. | | | |
| rxs03219 | 1114 | GB_HTG3: | 200000 | AC005769 | Homo sapiens | Homo sapiens | 38,613 | 21-Aug-99 |
| | | AC005769 | | | chromosome 4, | | | |
| | | | | | *** SEQUENCING | | | |
| | | | | | IN PROGRESS ***, | | | |
| | | | | | 5 unordered pieces. | | | |
| | | GB_PR3: | 33189 | AF015723 | Homo sapiens | Homo sapiens | 36,866 | 21-Jan-98 |
| | | AF015723 | | | chromosome | | | |
| | | | | | 21q22 cosmid | | | |
| | | | | | clone Q4B12, | | | |
| | | | | | complete sequence. | | | |
| | | GB_HTG3: | 159747 | AC007315 | Homo sapiens clone | Homo sapiens | 35,005 | 23-Apr-99 |
| | | AC007315 | | | NH0189B16, | | | |
| | | | | | *** SEQUENCING | | | |
| | | | | | IN PROGRESS ***, | | | |
| | | | | | 3 unordered pieces. | | | |

The application's sequence listing, which the Patent Office published only in electronic form, follows.

SEQUENCE LISTING (362 sequences)

SEQ ID NO: 1 - DNA, 514 bp, Corynebacterium glutamicum
  CDS (101)..(514): RXN03181
gtcgcaaaagtcgctggcgtctccccttccactgtgtcgcgggcgttttcgcagcctgggcgagtgagtttttccactgcggagaaaatccgcaacgcgtgtggaaactcaggcttttcagcgccaaaacaccggcctcatcgctatggttgccgccgatgcgtcgaatcccttcttcttggaaattttccggggcgcgcagcacgccgcaagcactcagggctatacggttgcgcttgtcgacgcccgggagtcggcgattaagtccagggaggtgctggacaagatcgtcccccacgccgatggcttattgctcgctgcttcaaggatggattctggtgagatccacaaagtcgcgcgggaaattcccactgtattaatgagccgtgaagtgcaaggtattcccagcgtgatggtggataactacgacggtgcgccgaaggctgtggtgcatttggtggatcaggggtgccgctccattacctatatcgccggtcctaataaatcctgggct

SEQ ID NO: 2 - protein, 138 aa, Corynebacterium glutamicum
VETQAFQRQNTGLIAMVAADASNPFFLEIFRGAQHAASTQGYTVALVDARESAIKSREVLDKIVPHADGLLLAASRMDSGEIHKVAREIPTVLMSREVQGIPSVMVDNYDGAPKAVVHLVDQGCRSITYIAGPNKSWA

SEQ ID NO: 3 - DNA, 514 bp, Corynebacterium glutamicum; identical to SEQ ID NO: 1
  CDS (101)..(514): FRXA02880

SEQ ID NO: 4 - protein, 138 aa, Corynebacterium glutamicum; identical to SEQ ID NO: 2

SEQ ID NO: 5 - DNA, 576 bp, Corynebacterium glutamicum
  CDS (101)..(553): RXA00603
gaatgaatctcttgcgttttttgcacactacaatcatcacacaattgccgggtagttttgttgccagtttgcgcacctcaactaggctattgtgcaatatatgaagctagattccattgatcgcgcaattattgcggagcttagcgcgaatgcgcgcatctcaaatctcgcactggctgacaaggtgcatctcactccgggaccttgcttgaggagggtgcagcgtttggaagccgaaggaatcattttgggctacagcgcggacattcaccctgcggtgatgaatcgtggatttgaggtgaccgtggatgtcactctcagcaacttcgaccgctccactgtagacaattttgaaagctccgttgcgcagcatgatgaagtactggagttgcacaggctttttggttcgccagattattttgtccgcatcggcgttgctgatttggaggcgtatgagcaatttttatccagtcacattcaaaccgtgccaggaattgcaaagatctcatcacgttttgctatgaaagtggtgaaaccagctcgcccccaggtgtgaagcatgcattttgaagcatg

SEQ ID NO: 6 - protein, 151 aa, Corynebacterium glutamicum
MKLDSIDRAIIAELSANARISNLALADKVHLTPGPCLRRVQRLEAEGIILGYSADIHPAVMNRGFEVTVDVTLSNFDRSTVDNFESSVAQHDEVLELHRLFGSPDYFVRIGVADLEAYEQFLSSHIQTVPGIAKISSRFAMKVVKPARPQV

SEQ ID NO: 7 - DNA, 582 bp, Corynebacterium glutamicum
  CDS (101)..(559): RXN02946
cacggatttaccaagaccaccacccgcaactcagttacattgttcaaatgtcctaacacatttacatgagcttgttgggtgggcaacgaaaggagacatcatgaccaccgaagctcccatttggccagccgaactcttcgaagacctcgaccgcaacggaccaatccccctctacttccaagtagcccaacgcctcgaagacggcatccgcagcggagtcctcccacccggagcacgcctagaaaacgagatctccgtggcgaaacacctcaacgtatcccgccccaccgtccgacgcgccatccaagaagtcgtagacaaaggcctcttagttcgccgccgcggtgttggcacccaggtcgtccaaagccacgtcacccgcccagtcgaactgaccagtttcttcaacgacctcaaaaacgccaacctggaccccaaaacccgagtcctcgagcaccgctccttgcagcaagttccgccatcgcagaaaaactcggagtttccgcaggtgacgaagtcctcctcatccgccgcctccgctccaccggagacatccccgtagcgatcctggaaaactacctc

SEQ ID NO: 8 - protein, 153 aa, Corynebacterium glutamicum
MTTEAPIWPAELFEDLDRNGPIPLYFQVAQRLEDGIRSGVLPPGARLENEISVAKHLNVSRPTVRRAIQEVVDKGLLVRRRGVGTQVVQSHVTRPVELTSFFNDLKNANLDPKTRVLEHRSLQQVPPSQKNSEFPQVTKSSSSAASAPPETSP

SEQ ID NO: 9 - DNA, 531 bp, Corynebacterium glutamicum
  CDS (101)..(508): RXN01845
ggctccgtccgtaccggtggtgaagtaggagtagccgatgaacccgttgtcgaaggtggttgcctgctccgagacgagcaccgcacccgtgccgtcctcaatgatctccaactcctgggcgattgagaccacctgcgcgctctacctgcccgtcgaggccctggccgaggtcgtggacgcctacccgcaactggcgttggcgatcatgcggatgcagcaggaccaattggtccggtcccgggaacgcgagaccgcacagaccacctcgactgtcgagcagcgcgtggccgccgccctccaacacctggacgccaagctcgggcaaatccgacaagacggatccagcctgctgcaggtccgcctgcgccgcgacgacgtggccggcaccaccgtcgagtccgcctcccgggcaatggcgcggatgaagaaaaccggtgtcatcgactccggccgcgaatggatcgccattaccaaccaccaggccctggccgacctggtcgccggcctctaaacgcccacatccctctctct

SEQ ID NO: 10 - protein, 136 aa, Corynebacterium glutamicum
MISNSWAIETTCALYLPVEALAEVVDAYPQLALAIMRMQQDQLVRSRERETAQTTSTVEQRVAAALQHLDAKLGQIRQDGSSLLQVRLRRDDVAGTTVESASRAMARMKKTGVIDSGREWIAITNHQALADLVAGL

SEQ ID NO: 11 - DNA, 828 bp, Corynebacterium glutamicum
  CDS (101)..(805): RXN02910
aacctaggccgatacccatgtggaaatctcgacgtcttaaatggacgattggagctaaaaccacgaacagctgggattttccacgataggattgggtctcgtggagattcgttggttggaaggctttatcgcggtcgcggaagaattgcactttagtaatgctgcgattcgtttggggatgccgcaatcgccgttgagtcagttgatccggcggttggagtcggagttggggcagaagctttttgatcgcagtacccggtcggtggagttaactgccgcgggtcgggcgtttttgccacatgccagggggattgtggcgagcgctgcggtggcgagggaagctgtgaatgctgccgagggggagatcgttggtgttgttcgcattggtttttctggtgtgctgaactattccacgctgccgcttttgaccagtgaggtgcataaacggcttcctaatgtggagttggagctcgttggtcagaagttgacgagggaagcggtaagtttgctgcgcttgggggcgttggatattacgttgatgggtttgcccattgaggatccagagattgagactcggctgattagtttggaagagttttgcgtggtgttgccgaaggatcatcgtcttgcgggggaaggagtggtggatttggtggatctggctaaagatgggtttgtgacgacgccggagtttgcggggtctgtgtttaggaattccacctttcagttgtgtgctgaggctggttttgtgccgaggatcagccagcaagttaatgatccttacatggcgctgttgttggcgcggtagtcaatcatgggggagtatcc

SEQ ID NO: 12 - protein, 235 aa, Corynebacterium glutamicum
VEIRWLEGFIAVAEELHFSNAAIRLGMPQSPLSQLIRRLESELGQKLFDRSTRSVELTAAGRAFLPHARGIVASAAVAREAVNAAEGEIVGVVRIGFSGVLNYSTLPLLTSEVHKRLPNVELELVGQKLTREAVSLLRLGALDITLMGLPIEDPEIETRLISLEEFCVVLPKDHRLAGEGVVDLVDLAKDGFVTTPEFAGSVFRNSTFQLCAEAGFVPRISQQVNDPYMALLLAR

SEQ ID NO: 13 - DNA, 687 bp, Corynebacterium glutamicum
  CDS (101)..(664): RXN02553
tggcgcaggtgtttgtgccagaaaataaccgcgacgctgatcatacggtcagcttgctggcggaagtaccacggtggtggcgttggcggatcaccttcaaatggcggtgaaacgtaatgagttggaacccgagctgacgtccaaccccaacccattaagcgcagaagtgcatcatttgtatcctgaggaaactcgtcttgcaacggagatcctggaacgcaccaacaattggcttgctgaaaaagggatccctccgctgccaccagcggaagttgtagccatctcattacacctggttaatgctggtttccgcacggaagacctcgcagaaacctacgtgatgactggcgttttcgagcagctctttgaggtaatcgattcctcgtttggcatcacccttgaccgacaatccgtcaacgccgcacggtttatcacccacatgcgctacttctttgttcgcgttcaccacgacggacaactcaacgacggcatgtccgtgctgcgcaacagcctagaaatttcccacccggattcggtggcatgtgcggaaagactcagccaaatcctcagccttcgattgggtgccgaactttcctccgacgagcaaacctacctcgcgctccatgtcgcgaggttggctgaagatcgaggtactaccgctgattaacaagttctaggcgcgaatct

SEQ ID NO: 14 - protein, 188 aa, Corynebacterium glutamicum
MAVKRNELEPELTSNPNPLSAEVHHLYPEETRLATEILERTNNWLAEKGIPPLPPAEVVAISLHLVNAGFRTEDLAETYVMTGVFEQLFEVIDSSFGITLDRQSVNAARFITHMRYFFVRVHHDGQLNDGMSVLRNSLEISHPDSVACAERLSQILSLRLGAELSSDEQTYLALHVARLAEDRGTTAD

SEQ ID NO: 15 - DNA, 927 bp, Corynebacterium glutamicum
  CDS (101)..(904): RXS00686
ataggcttgaacaatacgtcgttacactggccgatttgatacctttcaaaacttttacccttcatcggagtgccaggggaacttagaggagcattaaataatggcgggaggaaatcgcgaacctggacgtacagtcacctccaaggtgatcgccgtactgggagcttttgaacacaccatgcgtccacttggtgtcactgaaatcgctgagctggcagacctcccaccaagtaccacccaccgtctcgtttctgaattaaccgaaggcggactactcagcaagaaatctgatgggcgctaccaattgggcttacgtatctgggaactcgcccaaaatacaggacggcagttacgcgacactgcacgcccgttcatccaagagctctactcacttacttccgagactgcgcagctagtggtccgcgataaagatgaagcacttttgattgaccgagcctacggcacgaagaaaattccacgctcggctcgagtcggtggtcgactacctctgaactccactgcggttggcaagattctccttgcgtttgatgagccatgggtaaaacagtcctatctcaagctgccactcaacgcctccaccccaaagacaattgtgaatcccgacgtcttggctgcgcagctgaaacaaattcactcgcaaggctttgccatcacacatgacgagcaacgaatcggcggcgcatcgatcgccgtaccggtctggcatacaggaaaactgggagcagcactggggttggtggttcccaccgcacaggctgcaaatcttgagcgctatctcccgatccttcaggcgacaagtcagagaattacaaaagcaaccgcgctcattcctttggacacacttttggcttcacacaaaaatgcagaacgaaaaggcgatacctaaacccgccctccatctgcata

SEQ ID NO: 16 - protein, 268 aa, Corynebacterium glutamicum
MAGGNREPGRTVTSKVIAVLGAFEHTMRPLGVTEIAELADLPPSTTHRLVSELTEGGLLSKKSDGRYQLGLRIWELAQNTGRQLRDTARPFIQELYSLTSETAQLVVRDKDEALLIDRAYGTKKIPRSARVGGRLPLNSTAVGKILLAFDEPWVKQSYLKLPLNASTPKTIVNPDVLAAQLKQIHSQGFAITHDEQRIGGASIAVPVWHTGKLGAALGLVVPTAQAANLERYLPILQATSQRITKATALIPLDTLLASHKNAERKGDT

SEQ ID NO: 17 - DNA, 777 bp, Corynebacterium glutamicum
  CDS (101)..(754): RXS00774
attatcgccttatagtgttgccatgcgtactgcatatagacagcaattggatgaattcgcacacaatctaatcattttgtgtgatctaactaaggagtgcatggataaggcgactgatgccctcctgcgcacttctttggcatcggcagaaagcgctttaggcaatgcagaaaagcttgaagagcttcgtactggatgcgagtctcaagccgtcgaacttttggcgcttgaaactcctgtagcccgtgatcttcgccaggttgtctcctccatctacatcgtcgaggaaattacccgtatgggtgctctggcaatgcacgtggctaattccgtgcgccgccgttaccccgatccggtgatcccggaggacatgcgtggctatttcaaggagatggcccgcctcgcagctgacatgacagatcatattcgtcagatcctcattgatcctgaaccagatcttgccctagagatggctaaaagcgatgacgcggtggatgatctgcatcagcacatcatgcgtattctcacgctgcgtccttggcctcacgacaccaagagcgcggttgatttgacgctgctttcccgcttctacgagcgttacgccgatcacacggtaaacgtggccgcccgtatcatttacctgtccaccgggctgcacccggaggagtacatggaaaagcgcgagcaacaaagggccgatgccgacatggagaagcgctgggccgagctggagcggcagttccgcaccagcgagtaaaaagctgcttctcgacgcta

SEQ ID NO: 18 - protein, 218 aa, Corynebacterium glutamicum
MDKATDALLRTSLASAESALGNAEKLEELRTGCESQAVELLALETPVARDLRQVVSSIYIVEEITRMGALAMHVANSVRRRYPDPVIPEDMRGYFKEMARLAADMTDHIRQILIDPEPDLALEMAKSDDAVDDLHQHIMRILTLRPWPHDTKSAVDLTLLSRFYERYADHTVNVAARIIYLSTGLHPEEYMEKREQQRADADMEKRWAELERQFRTSE

SEQ ID NO: 19 - DNA, 1362 bp, Corynebacterium glutamicum
  CDS (101)..(1339): RXN02493
ggttccgtagtaaacccaggcggcacctacctcgatcctgaggcagcagcagccggcgcagcagcagtagcaaaccagggtaataagtagctatttgtaggtgagcactcttcttgctttcgtattgggcgtggtcctcatgggcctcgccctacctgcgtatacgaaaattaaagatcggatgcgtcgccacaagtccgcggtcaccctgtccgaaaaccaggtcaccacggtggggcaggtcctccacctggcgattcaaggctccccaacgggaatcacggttgtcgatcgcaccggcgacgtcatcttatccaacggccgcgcccacgaattgggcatcgtccacgaaagatccgtcgacggcaacgtttggcgcgtcgcccaggaagccttccaagaccaagaaacccactcactcgacgtccacccagaccgcaatccgcggcgcccgggtagtcgcatcaccgcagtgcaggcagtggtcaagcctttaacgcttatcgacgatcgtttcgtgatcatctatgcctccgacgaatccgaaaacgtgcgcatggaatcggcacgccgagacttcgtcgcaaacgtctcccacgaactgaaaacccccgtcggcggcatggcactcctcgcggaagccctcatggaatcctccgacgacccagaacaagtcgaatacttcggatccaggctccaccgcgaagcccaccgcatggccgacatgatcaacgaactgatctccctttccaaacttcagggcgccgaacgactccctgatatggaacccgtccaggctgacgacatcatcagcgaagccatcgaacgcacccaactcgccgccgacaacgccaacatcgaaatcattcgcggcgaccgcaccggcgtttgggtagaagccgatcgatccctgctggtcacagccctggcgaacctgatcagcaatgcaatcaactactcaccaaaatcagtccccgtctccgtttcacaaagcatccgaaacgacgtggtcatgatccgagtaaccgaccgtggcattggcatcgcacccgaagaccaaggccgagttttcgaaagattcttccgcgtcgacaaagcccgctcccgccaaaccggcggaactggccttggcctcgcgatagtcaaacatgtcatggctaaccatggcggtagtattagtttgtggtcacgtcctggaacaggctccacatttacacttgaactccctgtataccacccagagtccaaggaaccggcaggatctaagcagggacctagtttggattcacctattcgtacgactgcgtccaaagcatctgggcgccgaaaggaaaaatcatgacgagaatcctgatcgttgaa

SEQ ID NO: 20 - protein, 413 aa, Corynebacterium glutamicum
VSTLLAFVLGVVLMGLALPAYTKIKDRMRRHKSAVTLSENQVTTVGQVLHLAIQGSPTGITVVDRTGDVILSNGRAHELGIVHERSVDGNVWRVAQEAFQDQETHSLDVHPDRNPRRPGSRITAVQAVVKPLTLIDDRFVIIYASDESENVRMESARRDFVANVSHELKTPVGGMALLAEALMESSDDPEQVEYFGSRLHREAHRMADMINELISLSKLQGAERLPDMEPVQADDIISEAIERTQLAADNANIEIIRGDRTGVWVEADRSLLVTALANLISNAINYSPKSVPVSVSQSIRNDVVMIRVTDRGIGIAPEDQGRVFERFFRVDKARSRQTGGTGLGLAIVKHVMANHGGSISLWSRPGTGSTFTLELPVYHPESKEPAGSKQGPSLDSPIRTTASKASGRRKEKS

SEQ ID NO: 21 - DNA, 1362 bp, Corynebacterium glutamicum; identical to SEQ ID NO: 19
  CDS (101)..(1339): FRXA02493

SEQ ID NO: 22 - protein, 413 aa, Corynebacterium glutamicum; identical to SEQ ID NO: 20

SEQ ID NO: 23 - DNA, 1578 bp, Corynebacterium glutamicum
  CDS (101)..(1555): RXN00631
cctacctgcgccgcaaggtggacacccaggatccgcagctaattcagactgttcgtggcgttggatatgttctgcgcaccccacgtagctaaattctcctatggaaaatccttatgttgctgcgctcgatgacgaaaaccaagaagtcggcgtaaaaaaagaagcagaaaaagaacctgaaataggtcccatcagagctgccggacgagccataccgctgcgcacccgcatcattttgatcgtggtgggtatcgccgggcttggtttgctggtcaacgcgattgctgtctccagcctcatgcgtgaagtttcctatacccgcatggatcaagagctagagacctcgatggggacgtgggcgcataacgttgagctgtttaatttcgatggcgtccgccaagggccacccagcgattattatgtggccaaggtttttcctgatggatccagcatcatcttcaacgatgcacaatcggcacccgatctagctgaaaccaccatcggtactggtccacacactgtggatgctgctagcggttctgcctccaacactccgtggcgtgtgatggcggaaaagaacggtgacattatcaccgtggtgggtaaaagcatggggcgtgaaacaaacctgctgtaccgattggtgatggtgcagatgatcatcggcgcgctgattctggttgctattttgattacttcactcttcctagtcagacgctcgttgcggccgttgagagaagttgaagagaccgccaccaggattgcgggcggtgatttggatcgacgtgtcccgcagtggccaatgaccacagaagtcggacagctgtcgaatgccctcaatatcatgttggagcagctccaagcctcaattctgaccgcccagcaaaaagaagctcagatgcgccgattcgttggcgatgcctcccacgagctccgcacaccactgacctctgtgaagggcttcaccgagctgtattcatcaggtgcaacagatgatgccaactgggtcatgtccaagatcggtggcgaagcccaacgcatgagtgtgcttgtggaagacctcctgtcactgacgcgtgccgaaggccagcaaatggagaagcaccgcgttgacgtgctggaactcgccttggcagtacgcggatccatgcgagcagcctggccagatcgcacagtcaatgtatccaacaaagctgagtccattccggttgtcaaaggcgacccaactcgcctccaccaagtgcttaccaacctggttgccaacggactaaaccacggcggaccggacgcggaagtcagcattgagatcaacaccgatggacaaaacgtgaggattctcgtggcagacaacggtgtcggaatgtctgaagaagatgctcagcatatcttcgagcgtttctaccgcgccgattcctcccgctcacgcgcatccggcggatcgggcctcggccttgcgatcacgaaatccctggtcgaaggccacggcggcacagtcaccgtcgacagcgtgcaaggcgaaggcacggtgttcacgatcaccttgccggcggtttcttaaaggcatcaagggccggaaaa

SEQ ID NO: 24 - protein, 485 aa, Corynebacterium glutamicum
MENPYVAALDDENQEVGVKKEAEKEPEIGPIRAAGRAIPLRTRIILIVVGIAGLGLLVNAIAVSSLMREVSYTRMDQELETSMGTWAHNVELFNFDGVRQGPPSDYYVAKVFPDGSSIIFNDAQSAPDLAETTIGTGPHTVDAASGSASNTPWRVMAEKNGDIITVVGKSMGRETNLLYRLVMVQMIIGALILVAILITSLFLVRRSLRPLREVEETATRIAGGDLDRRVPQWPMTTEVGQLSNALNIMLEQLQASILTAQQKEAQMRRFVGDASHELRTPLTSVKGFTELYSSGATDDANWVMSKIGGEAQRMSVLVEDLLSLTRAEGQQMEKHRVDVLELALAVRGSMRAAWPDRTVNVSNKAESIPVVKGDPTRLHQVLTNLVANGLNHGGPDAEVSIEINTDGQNVRILVADNGVGMSEEDAQHIFERFYRADSSRSRASGGSGLGLAITKSLVEGHGGTVTVDSVQGEGTVFTITLPAVS

SEQ ID NO: 25 - DNA, 1606 bp, Corynebacterium glutamicum
  CDS (12)..(1583): RXN00291
tggtgattcaagtggcaaccgtcgcgttggtggtagctatttgcaccggaattttcgcagttttgatgatggatcagatgaaaactgaggccgagcacacagcgctgtccatcggacgttgggtggcatccaacccgcagatccgcgaggaagtagcgcttgatactcaaacaggagcaaacccatcggccgaagaattagccgatggagatatccaagcggttgcacaggcggccaatgaacgcactggagctttgtttgtcgttatcactgacggtttaggtatccgcctgtcccacccagatgaggaacgtctgggggagcaggtgagcactagctttgaggctgccatgcggggtgaagaaaccatggcgtgggagactgggaccctcggtgcgtccgcgcgagcaaaagtgcctatctttgcgccggattctagtgttccagtcggtgaggtcagtgttgggtttgagcgagacagtgtgtattcccgcctgcccatgttcctcgccgcccttgctcttatttctgtgttgggaatccttatcggcgtgggtgtagccatgggcatgcgacgccgttgggaacgcgtgaccttgggtttgcagccggaggagctagtgacccttgtgcaaaatcagactgcagtcatcgatggcattgatgagggcgtgctggcgctgagcccaaacggaacaattggggtgcataatgagcaggcgcaatccatgattggtgcaggtcctatgagtggcaggacgttgaaagaactagggcttgacctgggtcttgatggcgttgtattgcatggtcagcatccggaaaccgttgcccataacggcaggatcctctatctggatttccaccccgtgcgccgtggggatcaagatttaggctacgtggtaaccatccgcgatcgtaccgacatcattgaactcagtgaacgcctcgactctgtgcgcaccatgacccacgcactccgcgcccagcgccacgagtttgccaaccgcatccacaccgcaacagggcttatcgacgccggccgcgtccacgacgcggcagagtttctaggcgatatatcccgcaacgggggacagtcacatccattgatcggatcagcgcacctcaatgaagcatttttgagctcatttttaagtactgcttctatttcggcatctgaaaagggcgttagtctgcgcatcaactctgacacgctcatccttggcactgttaaagatccagaagatgtagcaaccattttgggtaatttaatcaacaatgccatcgacgccgcggtggcaggtgaagccccacggtggattgagcttacgttgatggatgatgccgatacgctggtcatttctgttgcagattctggtcctggaatcccagagggcgtggatgtatttgccacagccacccagataggagactctgaagataatgaacgcacccacgggcatggcattggtctaaaactgtgccgggctttggctagatcacatggtggcgatgtctgggtgattgatagaggaaccgaagatggcgctgtatttggagtgaaactaccgggagtaatggagtaatggatcaaacacttaaagtt

SEQ ID NO: 26 - protein, 524 aa, Corynebacterium glutamicum
VATVALVVAICTGIFAVLMMDQMKTEAEHTALSIGRWVASNPQIREEVALDTQTGANPSAEELADGDIQAVAQAANERTGALFVVITDGLGIRLSHPDEERLGEQVSTSFEAAMRGEETMAWETGTLGASARAKVPIFAPDSSVPVGEVSVGFERDSVYSRLPMFLAALALISVLGILIGVGVAMGMRRRWERVTLGLQPEELVTLVQNQTAVIDGIDEGVLALSPNGTIGVHNEQAQSMIGAGPMSGRTLKELGLDLGLDGVVLHGQHPETVAHNGRILYLDFHPVRRGDQDLGYVVTIRDRTDIIELSERLDSVRTMTHALRAQRHEFANRIHTATGLIDAGRVHDAAEFLGDISRNGGQSHPLIGSAHLNEAFLSSFLSTASISASEKGVSLRINSDTLILGTVKDPEDVATILGNLINNAIDAAVAGEAPRWIELTLMDDADTLVISVADSGPGIPEGVDVFATATQIGDSEDNERTHGHGIGLKLCRALARSHGGDVWVIDRGTEDGAVFGVKLPGVME

SEQ ID NO: 27 - DNA, 1097 bp, Corynebacterium glutamicum
  CDS (1)..(1074): FRXA00291
gccgcccttgctcttatttctgtgttgggaatccttatcggcgtgggtgtagccatgggcatgcgacgccgttgggaacgcgtgaccttgggtttgcagccggaggagctagtgacccttgtgcaaaatcagactgcagtcatcgatggcattgatgagggcgtgctggcgctgagcccaaacggaacaattggggtgcataatgagcaggcgcaatccatgattggtgcaggtcctatgagtggcaggacgttgaaagaactagggcttgacctgggtcttgatggcgttgtattgcatggtcagcatccggaaaccgttgcccataacggcaggatcctctatctggatttccaccccgtgcgccgtggggatcaagatttaggctacgtggtaaccatccgcgatcgtaccgacatcattgaactcagtgaacgcctcgactctgtgcgcaccatgacccacgcactccgcgcccagcgccacgagtttgccaaccgcatccacaccgcaacagggcttatcgacgccggccgcgtccacgacgcggcagagtttctaggcgatatatcccgcaacgggggacagtcacatccattgatcggatcagcgcacctcaatgaagcatttttgagctcatttttaagtactgcttctatttcggcatctgaaaagggcgttagtctgcgcatcaactctgacacgctcatccttggcactgttaaagatccagaagatgtagcaaccattttgggtaatttaatcaacaatgccatcgacgccgcggtggcaggtgaagccccacggtggattgagcttacgttgatggatgatgccgatacgctggtcatttctgttgcagattctggtcctggaatcccagagggcgtggatgtatttgccacagccacccagataggagactctgaagataatgaacgcacccacgggcatggcattggtctaaaactgtgccgggctttggctagatcacatggtggcgatgtctgggtgattgatagaggaaccgaagatggcgctgtatttggagtgaaactaccgggagtaatggagtaatggatcaaacacttaaagtt

SEQ ID NO: 28 - protein, 358 aa, Corynebacterium glutamicum
AALALISVLGILIGVGVAMGMRRRWERVTLGLQPEELVTLVQNQTAVIDGIDEGVLALSPNGTIGVHNEQAQSMIGAGPMSGRTLKELGLDLGLDGVVLHGQHPETVAHNGRILYLDFHPVRRGDQDLGYVVTIRDRTDIIELSERLDSVRTMTHALRAQRHEFANRIHTATGLIDAGRVHDAAEFLGDISRNGGQSHPLIGSAHLNEAFLSSFLSTASISASEKGVSLRINSDTLILGTVKDPEDVATILGNLINNAIDAAVAGEAPRWIELTLMDDADTLVISVADSGPGIPEGVDVFATATQIGDSEDNERTHGHGIGLKLCRALARSHGGDVWVIDRGTEDGAVFGVKLPGVME

SEQ ID NO: 29 - DNA, 1620 bp, Corynebacterium glutamicum
  CDS (101)..(1597): RXA00129
agtttttcatttaaaaaaggggcagtttctcattcttgcctggctcacgcgacttcgacatcgcattgtagataaatggcgaacctcactgcaggttcgcgtgctcggctccatcttcaccgcatcagctgtcgtgatgatccttttggggctgggcatgctgactgtattcacccaacggttggtggatcagaaaatcgatattgcgagctccgaaatcgaccgcgcccgcgtcatcgtcgaagagcaaatcaccgcatccggcgcctcaacatcggtgcaggcgcgagtgaactctgcccgcgctgcgctctccagcttgggtaccagcggcggtacagaaaccaacgccgcctacgatccagtcgtgttggtgaacaacgatgacctggtggtctctcccgagggttaccaaatcccagaacgtctgcgatacttcgtctctgagaaccaagtctcgtatcagttctccagcatcgaccaaggcgacggatcgtcctaccaagcgctcatcatcggaacgcccacggaaagcgacatcccgaacctccaggtgtatctggtgttctccatggaaagcgacgaatcctctcttgctctcatgcgaggactcctctcagctgcactgctgatcgtggtggtgctgctggtcggtatcgcatggctagccacccaacaggtcaccgcgccggtgcgttcggcgagccggattgcggagcgtttcgctcaaggcaaactgcgtgaacgcatggtggtggaaggcgaagacgagatggcccgcctggcggtgtccttcaacgcgatggccgaatcgctgtccgcgcagatcaccaaattggaggaatacggcaatctgcaacgacaattcacatcggatgtctcacacgaattgcgcacaccgctgacaacggtgcgcatggctgctgatctaattgccgatagtgaagatgaactttcacccggtgcgcgccgcgccagccaactgatgaacagggagttggaccgattcgagtcgctgctgagcgatctgttggaaatttcccgacacgacgccggcgttgccgaactgtccaccgcgcttcacgatgtccgcatcccagtgcgatcggcattggaacaagtacaacacttggccaccgagctcgatgtggaattgcttgttaatttgcccgaagaagcgatcaacattcaaggcgattccaggcgcatcgaaagaatcattcgcaaccttctagccaatgcgatcgaccactccaagggcttgcctgttgagttgaaagttgccgacaacgtggacgcagtagcgatcgttgttattgatcacggcgtcggcctgaaacctggacaagacgaattggtgttcaacagattctggcgagccgacccttcgcgcgtccgccattctggtggcaccggcctgggtcttgcgatttctcgcgaagatgcgatgcttcatggaggaaaccttgatgcggcgggaacgatcggtgttggttccattttccgtttggtcttgcctaaagaaccgcatggaaattatcgtgaagcaccgatcccgttgatcgctccagagacaccgtgggaaggggagcagcagtgagtaaaatttcgacgaaactg

SEQ ID NO: 30 - protein, 499 aa, Corynebacterium glutamicum
VLGSIFTASAVVMILLGLGMLTVFTQRLVDQKIDIASSEIDRARVIVEEQITASGASTSVQARVNSARAALSSLGTSGGTETNAAYDPVVLVNNDDLVVSPEGYQIPERLRYFVSENQVSYQFSSIDQGDGSSYQALIIGTPTESDIPNLQVYLVFSMESDESSLALMRGLLSAALLIVVVLLVGIAWLATQQVTAPVRSASRIAERFAQGKLRERMVVEGEDEMARLAVSFNAMAESLSAQITKLEEYGNLQRQFTSDVSHELRTPLTTVRMAADLIADSEDELSPGARRASQLMNRELDRFESLLSDLLEISRHDAGVAELSTALHDVRIPVRSALEQVQHLATELDVELLVNLPEEAINIQGDSRRIERIIRNLLANAIDHSKGLPVELKVADNVDAVAIVVIDHGVGLKPGQDELVFNRFWRADPSRVRHSGGTGLGLAISREDAMLHGGNLDAAGTIGVGSIFRLVLPKEPHGNYREAPIPLIAPETPWEGEQQ

SEQ ID NO: 31 - DNA, 1455 bp, Corynebacterium glutamicum
  CDS (101)..(1432): RXN00651
ggctgcctcggtggtggtctctggggttgcttcaggttccgccggggtacaagcggtgagcatgatggaagcagcgaggatagtaggtaatgtacgacgcatgcagtcaagcctagatcgtgtgtcggaaaccggacgcaatgagctcgatgttgaaacccttgtgaagaaggggaatcaaccgggcgcgatgagctatcgcaacagtatccacattttgacagcctcgctgctggtcgtggggttgggagcttccgcccgcctgacgctgccgatgtttgcgctgtcgtgcgtgctgttgtttgtgtggggttttctgtacttctatggatcaaccaaacgcgtagatttgagccacggcatgcagctgggctggctgtttgtgctgacgctggtgtggatttttatggtgccgatcgtgcccgtgtccatttatctgctgttcccgctgtttttcctctatctacaggtgatgcctgacgtgagaggcattattgcgattttgggtgcgacagcgattgcgattgccagccagtattccgtggggttgacctttggtggtgtgatgggtccggtggtctctgcgatcgtgaccgtggctattgattacgcgttccgcacgttgtggcgggtgaataatgaaaagcaggaattgattgatcagttgattgaaactcgctcccagctggcggtgacggaacgaaatgcgggtattgctgcggaacgtcaacgtattgcgcatgaaattcatgacacggtcgcccagggactctcctccattcaaatgctgctgcatgtctctgaacaggagattctcgttgctgagatggaagagaagccaaaggaggcgatcgtgaagaagatgcgccttgcccgacaaacagcctccgacaatctcagtgaggctcgcgcgatgattgcggcgttgcaaccggcagcgctgtctaaaacctccttggaagcagcacttcaccgcgtcacagaaccgttgttgggtattaattttgtgatttctgtcgacggtgatgttcgccaactgcccatgaaaactgaagccacccttctgcgaattgctcaaggtgcgatcggaaatgtggcgaaacattcagaggcgaaaaactgccacgtgacactaacctacgaagacacagaagtacgccttgatgtggttgatgacggtgtgggttttgagccttcggaagtgtccagtacccccgctggccttggccatatcggcttaaccgcattgcagcagcgtgcgatggaattgcacggcgaagttatagtggaatctgcatatgggcagggtactgcggtatctgcagcattgccggtggagccaccagaggggtttgtcggggcgccggttttggcagattcggactcaagtgctacaggcgaggttgaactaagttctccaactgacgatgagtaaggctagactaaagtacgatt

SEQ ID NO: 32 - protein, 444 aa, Corynebacterium glutamicum
MQSSLDRVSETGRNELDVETLVKKGNQPGAMSYRNSIHILTASLLVVGLGASARLTLPMFALSCVLLFVWGFLYFYGSTKRVDLSHGMQLGWLFVLTLVWIFMVPIVPVSIYLLFPLFFLYLQVMPDVRGIIAILGATAIAIASQYSVGLTFGGVMGPVVSAIVTVAIDYAFRTLWRVNNEKQELIDQLIETRSQLAVTERNAGIAAERQRIAHEIHDTVAQGLSSIQMLLHVSEQEILVAEMEEKPKEAIVKKMRLARQTASDNLSEARAMIAALQPAALSKTSLEAALHRVTEPLLGINFVISVDGDVRQLPMKTEATLLRIAQGAIGNVAKHSEAKNCHVTLTYEDTEVRLDVVDDGVGFEPSEVSSTPAGLGHIGLTALQQRAMELHGEVIVESAYGQGTAVSAALPVEPPEGFVGAPVLADSDSSATGEVELSSPTDDE

SEQ ID NO: 33 - DNA, 1455 bp, Corynebacterium glutamicum; identical to SEQ ID NO: 31
  CDS (101)..(1432): FRXA00651

SEQ ID NO: 34 - protein, 444 aa, Corynebacterium glutamicum; identical to SEQ ID NO: 32

SEQ ID NO: 35 - DNA, 558 bp, Corynebacterium glutamicum
  CDS (101)..(535): RXA00006
aacctataggaaaacgggaggtcagattacgctcttgtgttacacatcacaggatatggtagaagatgttcgcctatccaccccgtgaaagaagataaaaatggtcgattttgacaccatcgcagcccgacttgtcaccgaaacagaagaagcaatcatctacgccacccgcgatggaataatcagactctggaacggcggctccgagaaactctttggatacacggccggcgaagcccttggaaaatcactcgacatcatcattcccgaaaaacaccgcaaggcccactgggacggatgggatcgcgtcatggaatccggcgaaactcgctatggctccgaaccgcttaacgttccaggcattcgtgccgatggatccaaaatgtctttggaattctccatcaccatcctgaaggacgattccggaaaaatcgaaggcgttgcagcttttctccgcgatgtcaccgccaattgggatgagaaaaaggccctgcggatccgaatcaaagagttggaacgccaaatcgagggccattaaggagattcttgggtgcgcgg

SEQ ID NO: 36 - protein, 145 aa, Corynebacterium glutamicum
MVDFDTIAARLVTETEEAIIYATRDGIIRLWNGGSEKLFGYTAGEALGKSLDIIIPEKHRKAHWDGWDRVMESGETRYGSEPLNVPGIRADGSKMSLEFSITILKDDSGKIEGVAAFLRDVTANWDEKKALRIRIKELERQIEGH

SEQ ID NO: 37 - DNA, 1008 bp, Corynebacterium glutamicum
  CDS (101)..(985): RXA01860
agttggtcaatcagcacttcaaaggccgaggaaaagtgttatcgcgggtgtcaagtaaagtatcggcgggacgctcttttctgatgctcgtgcccaaggtgtgaatccattcattcttgctgatcagctgctttacgatgctaagcacgcaggtagaaatcgggttgcggtgcgcagagctgaaaacaccattgtccgctcagctaagcccgcattctcagttgaggaactttcggagatcctggagtcacattctattcgcctcgagctgcagccgatcctagaacttgaaacaggtcgggtgggtgcagccgaaggtctgctccgaatcaacttggatggcaccgatgttcctacggggcagtttgttcagtcggttgaacaggccgggctagccccgaagcttgatatcgcagtcatgagagaaggaattaatcatattgagaggctgagagctgtgtgtccgactttcagcctcgctttgaatctgtcgggctattctctgagctcggcgaaaatacgggaggaactaagagccgaatttagagctcgcgatctgccaaggggatcaattaggtttgagattactgagaccgctccgattgaagacattgacgcggcaaaagagtttgtgcagatgttgaaagattttggcttccacatcgtaatcgatgactttggcgcaggacatgagccttatcaatatctaaagaagttcgactttagcgtgctgaagattgcaggtgaattcatagaaggtatggtcaccaaccgcgtggaccgaagcatcgtcgaatctattgctcaacttgctaaggatgaggagatggaaactgtcgccgagtttgtttcaagcaaggagattttggaggcggtacgagagataggcgtaacgtacgcccagggtttccatattggtaaatctaagccgattgatgaatttatagctacttatctcgagacgaaccaaaccgctacctgggggtaggaagaatatgaaaaagaaga

SEQ ID NO: 38 - protein, 295 aa, Corynebacterium glutamicum
VNPFILADQLLYDAKHAGRNRVAVRRAENTIVRSAKPAFSVEELSEILESHSIRLELQPILELETGRVGAAEGLLRINLDGTDVPTGQFVQSVEQAGLAPKLDIAVMREGINHIERLRAVCPTFSLALNLSGYSLSSAKIREELRAEFRARDLPRGSIRFEITETAPIEDIDAAKEFVQMLKDFGFHIVIDDFGAGHEPYQYLKKFDFSVLKIAGEFIEGMVTNRVDRSIVESIAQLAKDEEMETVAEFVSSKEILEAVREIGVTYAQGFHIGKSKPIDEFIATYLETNQTATWG

SEQ ID NO: 39 - DNA, 2088 bp, Corynebacterium glutamicum
  CDS (101)..(2065): RXA01861
tctttgcgttcgcgtatttgattgctgtaattggctcatactcactggtatacggcgattcgttagtcgcaattgtgtggccatcagtgggaatcgctgtgtggtggcccgtgacctgcagaagctggaaaaacttcgcctgatttgtggatacgtgtttctagtcccagccatatacctgcacttttttgcggaaacctccctcaggggagtgattctggcaggaattgcgcacgctatcgcaggtcctggcgttgcactggttatggcattcatggaaaatgcgcaattgccagaactgttgcgtaaacggcatgcattcgcacccttctcccatattcgccttccaggcgatgtattccggctcctcgtcgcgggcattgtcatggtcgcaatatccaaattgattgtgattcttgcttatgcactggcagatttgccgtattcattcaccctttatctgacgatggcccttcgtgacttgactggcattattgtggttgccgggcccggaattgcactttcgacgccgctggtactaaatattcaccgatcagcatggcgcgagttcgcagttgttatcatagctacggtcggagtgctggcgctcattttcggatttgctgtggatcttccgacggtctacttggcaatgttgccattgtattggagtgcaacccgtcttccagtgcttttagccgttcttcatgcggtgtttacttcagcaatagtcgtaattctgtatttcctattaggtaccggatcttttgcgattacggatgaatccatactggtgcaggcaacgacaattcagctttttgttctgatgtgtatcttgttgtcgctagttgtgtcaacgacagtccagcagacatcagcactggttgaagagctagaggtggtagcgaagacccttcctgatgcgctttttatcgtaaacaaaaatggaacagcatttcctgttaacgcaggcgcgaaaaatttcgtcaagcaatcaccggatgggcattattccatgccgaaactacagaatatagacggtgaacccatggatgagaaagaaagtccgagcagtatggccttgcgtggacaaggtgtcgaaggagtattagccaagttaggtgaagtactgggagaagatccggacttggcgcgtcgaatcttcgaaattagtgcctcaccgatgtatctgcgtggagaaactgaaccgggtcatgcgctcgtgatttggcatgacagtactaatgagtattacacgatgcaacaattgacgcttgcatatgaagaatcgcggctgctatttgaaaaagcccctcaagggattgccatgctggacccttcgggagaaatcgtaatggcgaatcgatcctttggtgacttggtgggaacgactcctgttcgactcctaggacgaaatctagaggatttcggagtagaggagggaaccatggaatacgtgacccctgttctgtcggacccagaagccgttgtgcacttagatcgttcgctcgaaacattgagaggtaaacagaaaaacgttgctatgtcatttagctcgatgggcaatgttggaggcagaatcggaactttactcgttaatgttgtcgatgtaaccgagcgccaagaactcatcgagcttgtggagcatttggcggatcatgactccctgacaggattggtcaatcgcaggcggctggaatctgatatcgaagagcttatcctcaagaatgaacgcgattcgaccgatagtgcattgttgcttttggatctggattacttcaaggaagttaatgattccctcggccatgaggctggtgaccagttgcttattgagtttgctgagatcctcaaagacagcgtgagggattccgacattgtcggacgcatcggcggcgatgaattcgttattgttttgcctgacacagacagggatggcgctgaagcaatcggtataagaattattgagttggtcaatcagcacttcaaaggccgaggaaaagtgttatcgcgggtgtcaagtaaagtatcggcgggacgctcttttctgatgctcgtgcccaaggtgtgaatccattcattcttgctgat

SEQ ID NO: 40 - protein, 655 aa, Corynebacterium glutamicum
VVARDLQKLEKLRLICGYVFLVPAIYLHFFAETSLRGVILAGIAHAIAGPGVALVMAFMENAQLPELLRKRHAFAPFSHIRLPGDVFRLLVAGIVMVAISKLIVILAYALADLPYSFTLYLTMALRDLTGIIVVAGPGIALSTPLVLNIHRSAWREFAVVIIATVGVLALIFGFAVDLPTVYLAMLPLYWSATRLPVLLAVLHAVFTSAIVVILYFLLGTGSFAITDESILVQATTIQLFVLMCILLSLVVSTTVQQTSALVEELEVVAKTLPDALFIVNKNGTAFPVNAGAKNFVKQSPDGHYSMPKLQNIDGEPMDEKESPSSMALRGQGVEGVLAKLGEVLGEDPDLARRIFEISASPMYLRGETEPGHALVIWHDSTNEYYTMQQLTLAYEESRLLFEKAPQGIAMLDPSGEIVMANRSFGDLVGTTPVRLLGRNLEDFGVEEGTMEYVTPVLSDPEAVVHLDRSLETLRGKQKNVAMSFSSMGNVGGRIGTLLVNVVDVTERQELIELVEHLADHDSLTGLVNRRRLESDIEELILKNERDSTDSALLLLDLDYFKEVNDSLGHEAGDQLLIEFAEILKDSVRDSDIVGRIGGDEFVIVLPDTDRDGAEAIGIRIIELVNQHFKGRGKVLSRVSSKVSAGRSFLMLVPKV

SEQ ID NO: 41 - DNA, 1239 bp, Corynebacterium glutamicum
  CDS (101)..(1216): RXA02669
acgtgcacattggaaatctgcgccgcaagctggaagcacctgcgccgggttcacacttcatcgacaccatccgaggtgttggctaccggatggccttcaaatgacagccctcatcccagctcgccacagcctgacttttcgtctgctcaccgcgcagcttgctgtggtgttgatcagtctgctggccgccctgattgtggctgccttggtagggcctgcaattttcaattctcacctggatctttccggcccgattgatccccgccagacggatttccacattcaggaggcctaccgggacgccaattacattgccctcgcagcggcacttcccaccgcagtgttgagctccattggtgtgagtttttggctttcccaccgcctgggccagccgttgtggcgactgtcccgggctgcaactgccatgagctccggcgactaccaggtgcgcgtacccatttccgatgtggataaagaggtcgctgctctatctctcgccttcaattccatggcggatcagctcgaacacacagaagaactccgccgaaacatgctctccgatctatcccatgaaatgaacactcccctttccgtcctccttgtttatgtcgacggtttgcaggacggcatggtggagtgggacgccgacacccacgcagttttcgccgagcaacttggccggctttcccgcctcacatcagatcttgatgatgtctctagagcccaagaacaccgcttcgacctggtctacagcaccgtcgccatcggtggtctcattcacaatgccgccggagccgccgcaggttcctaccaagaaaaaggcgtggccctggaagtaacaggcagcgattccaccgaactcatccgcgttgatagccaacgcttcgcccaagtcatggccaacctcttctccaacgccttgcggcacacccccgccggtgggaaagttcacgtccgcgtcctgcgtcaaggcgtgggaaccatcgtcatcgaagtcatagacaacggcgaaggaatcgcccctgaacacgtaaaatacgttttcgaacgctacttccgcgccaaacgatccgactccgacgaccaatccggctccggaatcggcctcaccatctcccgcgcactcatcgaagcgcaaggtggcacactaaccgcagaatccgctggcctgggcaaaggcgcgaaatttaccatccgactaccccttttaagcaaataaaaaaattgcttttcgacgct

SEQ ID NO: 42 - protein, 372 aa, Corynebacterium glutamicum
MTALIPARHSLTFRLLTAQLAVVLISLLAALIVAALVGPAIFNSHLDLSGPIDPRQTDFHIQEAYRDANYIALAAALPTAVLSSIGVSFWLSHRLGQPLWRLSRAATAMSSGDYQVRVPISDVDKEVAALSLAFNSMADQLEHTEELRRNMLSDLSHEMNTPLSVLLVYVDGLQDGMVEWDADTHAVFAEQLGRLSRLTSDLDDVSRAQEHRFDLVYSTVAIGGLIHNAAGAAAGSYQEKGVALEVTGSDSTELIRVDSQRFAQVMANLFSNALRHTPAGGKVHVRVLRQGVGTIVIEVIDNGEGIAPEHVKYVFERYFRAKRSDSDDQSGSGIGLTISRALIEAQGGTLTAESAGLGKGAKFTIRLPLLSK

SEQ ID NO: 43 - DNA, 1380 bp, Corynebacterium glutamicum
  CDS (101)..(1357): RXN01211
gacagctgcagcggtgtgggcggcgaaccgctacatgcgctgggactcgtaccgctaagcctgcagccgacgggattaaggcagctaacattgagacacgatgaataaagatttctggaccgcaggctggaccgcccgctggttttcgcgcggggtttcccttttggccagcccagttaccgccccactgaactcttggcggagattgcctaacttggccaagtacaccctctacaccagggtgtcgttgcaagcgatccccgtggtgttgctgtcggcgtatttcctgggcatcgtagctaatgcaggcaccctgaatccctcatttgtgtggctgctgggtttctcggtcatccttttaatagtgacggtattggtttatgaatatcagccatcgctgaattctcatcctaggcgcagcgtacagccgttcttcttcaccgggttggtgctcaacgttttaggcgttgtggtgtctgtggtgcttcaaattccgggcttaaacatgtcggacaacacccgagcaactgcccttattttcactcttacctgcgtatttctgctttcgatcgcctacattccgtggatgaattaccgatgggtttggctgatcgcaatgtctgcagtgttgtggtggaccagcacaacgactgattatttaagtgcattgtgggtggttatcccgccactcatggcaggaaccgtccgactttccgtatggaccgtcgatgtcatgaaagaggttgagcgttcccgcgaattggaagcctccctccgcgtcaccgaagaacgccttcgtttcgcccaggaactccacgacactttaggacaacacctggcggcaatgtccgtgaaatcagaactggcgcttgccctggcgaaacgcggcgacgaccgcctcgaaaacgagctgcgtgagctccaaaaactcacccgcacctccatgtcggaaatgcgcgacgtcgtctccggctaccgcaccgtcaacctcgccacggaaatcgagggcgctaaaagtttgcttgccgacgcccacatccacctttccgtcatcggcaccacgtcccaggtgtcacccgctcaccgagaactgtgcgcgtggcttgtccgggaagccaccacaaacattctgcgccactctgatgcaacggatgccaccctcacgttgagcagcacagaggtgcgcatggacaacaatggtgtgaacaaggacatcggcagactctctggtctcagcgccctgcgctcacgagcggaatcagccggaatgacgctcattgtgtcccgcgaagacgaccagttcagcgtccgcatgctcattaatgcacctgcaaatacacctgcagaaaaggaagcttaaatgatttccatttccatcgc

SEQ ID NO: 44 - protein, 419 aa, Corynebacterium glutamicum
MNKDFWTAGWTARWFSRGVSLLASPVTAPLNSWRRLPNLAKYTLYTRVSLQAIPVVLLSAYFLGIVANAGTLNPSFVWLLGFSVILLIVTVLVYEYQPSLNSHPRRSVQPFFFTGLVLNVLGVVVSVVLQIPGLNMSDNTRATALIFTLTCVFLLSIAYIPWMNYRWVWLIAMSAVLWWTSTTTDYLSALWVVIPPLMAGTVRLSVWTVDVMKEVERSRELEASLRVTEERLRFAQELHDTLGQHLAAMSVKSELALALAKRGDDRLENELRELQKLTRTSMSEMRDVVSGYRTVNLATEIEGAKSLLADAHIHLSVIGTTSQVSPAHRELCAWLVREATTNILRHSDATDATLTLSSTEVRMDNNGVNKDIGRLSGLSALRSRAESAGMTLIVSREDDQFSVRMLINAPANTPAEKEA

SEQ ID NO: 45 - DNA, 895 bp, Corynebacterium glutamicum
  CDS (101)..(895): FRXA01211
gacagctgcagcggtgtgggcggcgaaccgctacatgcgctgggactcgtaccgctaagcctgcagccgacgggattaaggcagctaacattgagacacgatgaataaagatttctggaccgcaggctggaccgcccgctggttttcgcgcggggtttcccttttggccagcccagttaccgccccactgaactcttggcggagattgcctaacttggccaagtacaccctctacaccagggtgtcgttgcaagcgatccccgtggtgttgctgtcggcgtatttcctgggcatcgtagctaatgcaggcaccctgaatccctcatttgtgtggctgctgggtttctcggtcatccttttaatagtgacggtattggtttatgaatatcagccatcgctgaattctcatcctaggcgcagcgtacagccgttcttcttcaccgggttggtgctcaacgttttaggcgttgtggtgtctgtggtgcttcaaattccgggcttaaacatgtcggacaacacccgagcaactgcccttattttcactcttacctgcgtatttctgctttcgatcgcctacattccgtggatgaattaccgatgggtttggctgatcgcaatgtctgcagtgttgtggtggaccagcacaacgactgattatttaagtgcattgtgggtggttatcccgccactcatggcaggaaccgtccgactttccgtatggaccgtcgatgtcatgaaagaggttgagcgttcccgcgaattggaagcctccctccgcgtcaccgaagaacgccttcgtttcgcccaggaactccacgacactttaggacaacacctggcggcaatgtccgtgaaatcagaactggcgcttgccctggcgaaacgcggcgacgac

SEQ ID NO: 46 - protein, 265 aa, Corynebacterium glutamicum
MNKDFWTAGWTARWFSRGVSLLASPVTAPLNSWRRLPNLAKYTLYTRVSLQAIPVVLLSAYFLGIVANAGTLNPSFVWLLGFSVILLIVTVLVYEYQPSLNSHPRRSVQPFFFTGLVLNVLGVVVSVVLQIPGLNMSDNTRATALIFTLTCVFLLSIAYIPWMNYRWVWLIAMSAVLWWTSTTTDYLSALWVVIPPLMAGTVRLSVWTVDVMKEVERSRELEASLRVTEERLRFAQELHDTLGQHLAAMSVKSELALALAKRGDD

SEQ ID NO: 47 - DNA, 529 bp, Corynebacterium glutamicum
  CDS (101)..(529): RXA01248
acggcggtcgaagggtgatgtttgaagatttgatgaagatttccccgccgggcactgaacgagggtggtattccccccggccgaagcgatactggggtctatggctgaccgcacaccgaccaccgccacgcccccggggcgggtgctggtcgtcgatgatgaacaacccctggctcagatggtggcctcctacctcatccgggccggcttcgacacccgccaggcgcacaccggcacccaggccgtggacgaggcccgtcgcttttcccccgatgttgtggtgctggatctggggctgcccgaactcgacggcctggaggtgtgccgacggatccgcaccttctcggactgctacatcctcatgctcaccgcgcgtggcagcgaggacgacaagatcagcggtttgaccctgggggcggatgactacatcaccaaaccttttagcatccgggaactggtgacccgggtgcatgcggtgctgcgccgcccgcgcaccagcaccaccccaccgcaggtgaccacccccttg

SEQ ID NO: 48 - protein, 143 aa, Corynebacterium glutamicum
MADRTPTTATPPGRVLVVDDEQPLAQMVASYLIRAGFDTRQAHTGTQAVDEARRFSPDVVVLDLGLPELDGLEVCRRIRTFSDCYILMLTARGSEDDKISGLTLGADDYITKPFSIRELVTRVHAVLRRPRTSTTPPQVTTPL

SEQ ID NO: 49 - DNA, 846 bp, Corynebacterium glutamicum
  CDS (101)..(823): RXA02668
cggccctccacccgcaatctacggttgagcggccgaggccaaggcagccgtttctgctcctgttgttaatcaggaaacagaaaaggccatacttgaaaccatgacgaacccctcccccgcgctaaatgaaaccctttccggcagggtgctgatcgttgaagatgagcgccctcttgctcgcatgatttcgctttatttaagcaaagcgggtttcgataccaccacgatccacgacggcgccgctgctccagataaggtcgctcacctgcgccccgacgtggtcattttggatcttgggctgcctggtcttgatggtttggaagtgtgcaaacgcatccgcgcgttcaccgattgctacatcctaatgctcaccgccaggggttcagagcgggatcggattacaggtttggaaattggggctgatgattacatcaccaagccgtttaatatccgcgaacttgtcattcgtatccagtcagtaatgcgtcgccctcgaaaaatcgatgaaaccatccaaaatggtttgaccttgacttatggccacattgagctggacaccttggcgcatgaagtcactgtcaaaggcgttggggtgacactgacccgcacagaatttgagctgcttcaagccctcatgcacaaaccgggagaggcagtgtctaggcgtgatttggtcagccaagtgtgggataccacctgggttggcgatgaacgcatcgttgacgtgcacattggaaatctgcgccgcaagctggaagcacctgcgccgggttcacacttcatcgacaccatccgaggtgttggctaccggatggccttcaaatgacagccctcatcccagctcgc

SEQ ID NO: 50 - protein, 241 aa, Corynebacterium glutamicum
MTNPSPALNETLSGRVLIVEDERPLARMISLYLSKAGFDTTTIHDGAAAPDKVAHLRPDVVILDLGLPGLDGLEVCKRIRAFTDCYILMLTARGSERDRITGLEIGADDYITKPFNIRELVIRIQSVMRRPRKIDETIQNGLTLTYGHIELDTLAHEVTVKGVGVTLTRTEFELLQALMHKPGEAVSRRDLVSQVWDTTWVGDERIVDVHIGNLRRKLEAPAPGSHFIDTIRGVGYRMAFK

SEQ ID NO: 51 - DNA, 819 bp, Corynebacterium glutamicum
  CDS (101)..(796): RXA02632
tatgcttaagaggtgttagcataagtgaaatatgttccaacgcgtggacgtcttaattgggaggaagtctgtcacggactggaagacgaaaagggtatcgatgaaaattttagttgttgatgacgagcaagctgtacgtgactccttgcgacgttccctttcgttcaacggatacaacgttgttctcgcagaagacggcatccaagcactagagatgattgacaaggaacagcctgctttggtgatcctcgatgtcatgatgcctggtatggacggacttgaggtctgtcgccaccttcgcagcgaaggcgatgatcggccaattcttattcttactgcccgcgataatgtttctgatcgtgttggtggcctcgatgcaggcgcagatgactatttggctaaaccatttgctcttgaagagctgttggcgcgcgtccgttcactggtgcgtcgctctgcagtggaatcaaatcagagttccagcattgaacaggctctattatcttgtggcgatttgacgcttgacccagaaagtcgagatgtctaccgcaacggacgcgccatcagccttactcgaacagagttcgcgctcctgcaattgctcctcaaaaaccaaaggaaagtgctcactcgcgcccagattttggaagaggtatggggctgcgatttccccacttcaggcaatgccctcgaggtctacattggataccttcgacgcaagactgaattggaaggagaagaccgcctgatccatacagtacgaggagtcggatacgtcctgcgagagaccgctccgtgacattaaggcgaatcggcgca

SEQ ID NO: 52 - protein, 232 aa, Corynebacterium glutamicum
MKILVVDDEQAVRDSLRRSLSFNGYNVVLAEDGIQALEMIDKEQPALVILDVMMPGMDGLEVCRHLRSEGDDRPILILTARDNVSDRVGGLDAGADDYLAKPFALEELLARVRSLVRRSAVESNQSSSIEQALLSCGDLTLDPESRDVYRNGRAISLTRTEFALLQLLLKNQRKVLTRAQILEEVWGCDFPTSGNALEVYIGYLRRKTELEGEDRLIHTVRGVGYVLRETAP

SEQ ID NO: 53 - DNA, 1488 bp, Corynebacterium glutamicum
  CDS (101)..(1465): RXA02631
tcggatacgtcctgcgagagaccgctccgtgacattaaggcgaatcggcgcaggggaaaatgggcctgcccctaccgaaagtgatgactccgacggttcaatgtcgttgcgttggcgcttggctttgctgagcgccactttggtagctttcgccgttggtgttattactgttgctgcatattggtctgtctccagctatgtcaccaactcaatcgatcgtgatctggaaaaacaagcggatgcaatgcttggacgagccagtgaagcgggattctatgcaaccgcagaaaccgaaattgctctgttaggtgaatatgccagtgacactcgaatcgccttaatcccacctgggtgggaatacgtcatcggtgaatccatatcactgcctgattcagatttccttaagagtaaagaagcggggaaacagatcctcgtaacaagtgctgagcgcattctcatgaaacgagatagctcgggcacagtggtggtttttgctaaagatatggtggataccgatcggcagctcacggtgcttggcgtcattctcttgatcattggcggcagtggtgttttggcgtcgattctgcttggtttcatcattgcgaaggaggggctgaaaccactgtcaaagctgcagcgtgccgtcgaagagatcgaacgaactgatgagcttcgtgcgattcccgtggtgggaaatgatgagttcgctaagttgactcgtagtttcaatgacatgctcaaggcactgcgggagtctcgtacccggcaatctcagttggtggcagatgcaggacacgagctgaaaactccactgacctcaatgcggacaaatattgaattgctgttgatggcaaccaacagtggaggatcgggaatccccaaggaagaattggatggccttcagcgtgatgtattggcgcagatgaccgaaatgtctgatttgattggtgatcttgttgatcttgcgcgtgaagaaaccgccgaaacgtcaagcattgtagatctcaaccaagtgttggaaattgcgcttgaccgaatggaaagccgtcgcatgacggtgcggatagatgtttccgagactgtggattggaaactgctgggcgatgatttttccttaaccagggcattagtaaatgttttggataatgccattaaatggtcgcctgagaatggcattgttcgagtgtcgatgtcacagatcgacaaagcaacggtccgcattgttattgatgattcagggcctggaattgctgaaaaagaacgaggattagttttggaacggttctatcgcgccgtcagctcccgttccatgccgggatcgggattaggtcttgccatcgtgaatcaggttgtgaatcggcatggtggccaactcgttgtgggtgaatcagatgatggcggaacgagaatcactattgatttgccaggggaacccattcgcagcgggttcgaaaatgtcgatgattaaaccactaaagagctcacagg

SEQ ID NO: 54 - protein, 455 aa, Corynebacterium glutamicum
MSLRWRLALLSATLVAFAVGVITVAAYWSVSSYVTNSIDRDLEKQADAMLGRASEAGFYATAETEIALLGEYASDTRIALIPPGWEYVIGESISLPDSDFLKSKEAGKQILVTSAERILMKRDSSGTVVVFAKDMVDTDRQLTVLGVILLIIGGSGVLASILLGFIIAKEGLKPLSKLQRAVEEIERTDELRAIPVVGNDEFAKLTRSFNDMLKALRESRTRQSQLVADAGHELKTPLTSMRTNIELLLMATNSGGSGIPKEELDGLQRDVLAQMTEMSDLIGDLVDLAREETAETSSIVDLNQVLEIALDRMESRRMTVRIDVSETVDWKLLGDDFSLTRALVNVLDNAIKWSPENGIVRVSMSQIDKATVRIVIDDSGPGIAEKERGLVLERFYRAVSSRSMPGSGLGLAIVNQVVNRHGGQLVVGESDDGGTRITIDLPGEPIRSGFENVDD

SEQ ID NO: 55 - DNA, 789 bp, Corynebacterium glutamicum
  CDS (101)..(766): RXA00609
aaggcccacggtggccgagctttcgtcaattccacaccaggtctaggatccattttcggcctggaaatccccgcaccagaacaatcaaaggaatacacccatgagcaagatcctgctcgctgaagatgacgccggcatcgcagatttcatcgttcgtggcctcatccgcgaaggcttcgaatgcgaggtcaccgaatccggcgccgaagctttcgcccgcgcacattccggcgatttcgatctcatggttttagacctcggcctcccccacatggacggcacggatgtcctagagcaattaagaaatctgcaggtcacgctacctatcattgtgctcacggcacgcaccaacatcgaggaccgcctccgcaccctcgagggcggcgccgacgattacatgcccaaaccattccaattcgcagaattactggcccgcatcaaactccgcctcgccaaacacactcctcaggaaacgccgaccgatgcgcgcgtgctacgaaacggcgatttggagctcgatcttcgtacccagcgtgtgctcatcgacggctcctggcacgacctttcccgccgcgaagtcgatctgctcgaaaccctcatgcgacacccagggcaaatcctctcccgagtccaactcctccgactggtgtgggacatggattgggaccccggctcaaacgtggtggacgtatatatccgcgcgttgaggaagaaaatcggtgcccatcgggtcgaaaccatccgaggatctggctaccggctgcgctaactgcagaacgagaccaaaaa

SEQ ID NO: 56 - protein, 222 aa, Corynebacterium glutamicum
MSKILLAEDDAGIADFIVRGLIREGFECEVTESGAEAFARAHSGDFDLMVLDLGLPHMDGTDVLEQLRNLQVTLPIIVLTARTNIEDRLRTLEGGADDYMPKPFQFAELLARIKLRLAKHTPQETPTDARVLRNGDLELDLRTQRVLIDGSWHDLSRREVDLLETLMRHPGQILSRVQLLRLVWDMDWDPGSNVVDVYIRALRKKIGAHRVETIRGSGYRLR

SEQ ID NO: 57 - DNA, 1188 bp, Corynebacterium glutamicum
  CDS (101)..(1165): RXA00284
aggacaaccaaattggcgcctctatcgggtgctcaccacacctgaacagtcgtagactctttgtaactaccgttgttgtttttccatatccaggagagtcatggcccgcaagctgaaggacaaacttccccgaagttttgacaaaatcgtcgaatcgggcgattttgacgctttcaaagaggtcttcaccgagcgcgccctcgacgccaaaaaccgtcatggcaacactgccctccacatgcgtggagtacctgaagaattcaagatttggatgcttgaccagggcctcgatgtggatatccgcaacgaagacggcgacaccccgctgcacgtgcactcccatgactggaacttaagccccgattttctgctcaaacgcggcgccgatgtctgcgcagtcaacaatgaaggcgaatcggttgcctactccgctgccttcttcccagaaaacctcaaaaagcttatcgacgccggcgccgacccctactcgcgcgccaacgacggcaccacgccgctgatgcgtgtcattcgaagcgccgacaccggacaaatcatcgaactagcagaaataaccaagctactttccggcacagaattcaccgacgcagaattccgagaaacccaagaacgcatcatcgcaatgggtgaaagattcgaagatgtccgggaagtctacaacgaagaatccgtcgaccaagcatctgcggacatgatctggctctacgatcgtttcgacatccccgaagaactccgcgccaacacaccaattttgcacgacggagtaagcccaatagaactgcctggggatacctggcaagaacaattcatcgaaggctacgatctcctcgttcccgcaatgggcaaagcgaaatccctgcaaggcgaagccatccgaattgccggacgagtatccaacgaatttcacggcaacggtggcgtcaactgggacaaagacttcaaacgcatggccaaatctctcaaccacatttgtgagcagggcgttcctttgggtgagccagaattagaagaactggctgcggccgttaaatcagtgcgcaaaggagaacccaccgaggaggagatcgacacccttccacggttggccaccaaatgggtcgcacaaaacccacaaccgctgccactgggagaggttgactacaagcgctgaacgttgagtttgagtttggt

SEQ ID NO: 58 - protein, 355 aa, Corynebacterium glutamicum
MARKLKDKLPRSFDKIVESGDFDAFKEVFTERALDAKNRHGNTALHMRGVPEEFKIWMLDQGLDVDIRNEDGDTPLHVHSHDWNLSPDFLLKRGADVCAVNNEGESVAYSAAFFPENLKKLIDAGADPYSRANDGTTPLMRVIRSADTGQIIELAEITKLLSGTEFTDAEFRETQERIIAMGERFEDVREVYNEESVDQASADMIWLYDRFDIPEELRANTPILHDGVSPIELPGDTWQEQFIEGYDLLVPAMGKAKSLQGEAIRIAGRVSNEFHGNGGVNWDKDFKRMAKSLNHICEQGVPLGEPELEELAAAVKSVRKGEPTEEEIDTLPRLATKWVAQNPQPLPLGEVDYKR

SEQ ID NO: 59 - DNA, 1530 bp, Corynebacterium glutamicum
  CDS (101)..(1507): RXA01827
ggtgaaagacggcggtggatttggcaccagtgcaactggtggtcaggtcgcagccccaattggccgagctgtgcttcaggcagccggaggattttaaaatatgagtcaagaagacatcactggaaaagatcgactccaagaactcatcggcgctgattatcgtctgcagtggatcatcggacacggtggcatgtccaccgtatggctcgcagatgatgtggtcaatgatcgcgaagtagccatcaaggtactgcgcccggaattttccgacaaccaggagttcttgaaccgtttccgcaatgaagcgcaagcggctgagaatatcgattctgaacacgtggtggccacctatgactaccgtgaggttccagaccctgctgggcatactttctgcttcatcgtcatggaatttgtccgcggtgaatcgcttgcggatcttctagagcgcgaaggcagactgccggaagacctggctcttgatgtgatggaacaggcggcacatggtttgtcggtgattcaccggatggacatggtgcaccgcgatatcaagccgggcaacatgctgatcacagccaatggcattgtgaagatcacggactttggtatcgctaaggctgccgctgctgtgcctttgacccgcaccggcatggtggtgggtactgctcaatatgtttcacctgagcaagcccagggcaaggaagtcaccgcggcttctgatatttattctctcggtgtggtcggctatgagatgatggctggccgccgcccgttcactggagattcttcggtgtctgtggcgatcgcgcacatcaaccaagctccgccgcagatgcccaccagcatttcggcacagactcgcgagttgattggcattgcgttgcgcaaggatccgggtcgccgtttccctgatggaaatgaaatggcgctagctgtttctgctgtgcgccttggcaagcgcccgcctcaaccgcgcacgagcgcgatgatggcgcaggcggaggcgccgtcgccaagcgaatcaacggcgatgctgggcagggtggcccggcctgcaacaatcacccaagaagcggccccgaaacgcggttccggcattggcattggtctgttcatcgcagctttgcttgccgtgattattggcgcggtgatctatgcgggcaccaccggaattttgttcaacgacactccggaagaaaccaccacacctgaaaccattacggaaacatacaccccaaccgtggaggaaaccacctctcagtgggtaccgccaacgcctccaacacggtcaacattcaccgaacctgaaacaacttcacaccgtccgacgacaagtgaagagagcacatccgaggaaccaaccacggaagctccaacaagtagccgaactgtgcctcaaatccctacctctacacctaggacgagtgctagcgttccagttgagactaatgcaccggctgatgatttaatcgacgccgtaaatggcctattggatgtaggaggagcgcagtgaccttcgtgatcgctgatcgc

SEQ ID NO: 60 - protein, 469 aa, Corynebacterium glutamicum
MSQEDITGKDRLQELIGADYRLQWIIGHGGMSTVWLADDVVNDREVAIKVLRPEFSDNQEFLNRFRNEAQAAENIDSEHVVATYDYREVPDPAGHTFCFIVMEFVRGESLADLLEREGRLPEDLALDVMEQAAHGLSVIHRMDMVHRDIKPGNMLITANGIVKITDFGIAKAAAAVPLTRTGMVVGTAQYVSPEQAQGKEVTAASDIYSLGVVGYEMMAGRRPFTGDSSVSVAIAHINQAPPQMPTSISAQTRELIGIALRKDPGRRFPDGNEMALAVSAVRLGKRPPQPRTSAMMAQAEAPSPSESTAMLGRVARPATITQEAAPKRGSGIGIGLFIAALLAVIIGAVIYAGTTGILFNDTPEETTTPETITETYTPTVEETTSQWVPPTPPTRSTFTEPETTSHRPTTSEESTSEEPTTEAPTSSRTVPQIPTSTPRTSASVPVETNAPADDLIDAVNGLLDVGGAQ

SEQ ID NO: 61 - DNA, 1254 bp, Corynebacterium glutamicum
  CDS (101)..(1231): RXA00813
tccagcggctggctaagtccgtggagatgcatgggctgaccggttctttgccgagggttttaagctcagcatgcgacgcggtcctcggggaggtggcggcatgactgacattgatctggtggtggaaaacgtccaaaggattatcgccaccaaagagacaccgccgacctctgcggaaatagcgagcctgattcgggaacaagcaggcgtgatcagtaacgaggacatcgtgatggtgttgcgtcgactgcgcagtgattctgtgggcgtgggaccgttggaatctctgcttgcgcttcctggcgtgacggatgtgttggttaatgcccatgacagcgtgtggattgatcgcggtcagggcgtggagaaagtcgacatggatctgggctcagaggaggcggtgcgtcgccttgccacccggttggcgttgacctgtggcagacgcttagatgatgcgcagcctttcgctgatggccgaatcaccagggacgacggcagcgtgttgcgcattcacgcggtgttggcacccttggcggaatccggcacgtgcatcagtgtgcgagtactgcgtcaagcacggctgagccttgatgatcttatccaaagcggcacggtgcctgaggacatcgcgcctgcgctccggaacatcatcaatcaacggcgctcgttccttgttgtcggtggcaccggcacagggaaaaccacattgctgtccgcgatgctcaccgaagttcccgctgatcaacgaatcatctgcatcgaggacaccgcagagcttcatcccggccatccaagcaccatcaacttggtgtctcgccaagcaaacgtcgagggcgccggcgccgtgagcatggcggatttgttgaaacaatcgctgcgcatgaggcctgaccggattgtcgtcggagagattcgcggtgcggaagtcgtggatcttttggctgcgatgaataccggacacgacggcggtgctggcaccattcacgcgaactccatctctgaagttcccgcgcgcatggaagctcttgcggcgaccggcggattggaccgcatggcattgcattctcaactcgcggccgcagtggacattgtgctggtcatgaaacacaccccttttggccgcaggctagctcaactcggggtgctccgcggaaatcctgtgaccacgcaggtggtgtgggatttggaccacggcatgcacgaagggagcgaagaggcatggtttatgccctaggccttcttagcgtggcggtg

SEQ ID NO: 62 - protein, 377 aa, Corynebacterium glutamicum
MTDIDLVVENVQRIIATKETPPTSAEIASLIREQAGVISNEDIVMVLRRLRSDSVGVGPLESLLALPGVTDVLVNAHDSVWIDRGQGVEKVDMDLGSEEAVRRLATRLALTCGRRLDDAQPFADGRITRDDGSVLRIHAVLAPLAESGTCISVRVLRQARLSLDDLIQSGTVPEDIAPALRNIINQRRSFLVVGGTGTGKTTLLSAMLTEVPADQRIICIEDTAELHPGHPSTINLVSRQANVEGAGAVSMADLLKQSLRMRPDRIVVGEIRGAEVVDLLAAMNTGHDGGAGTIHANSISEVPARMEALAATGGLDRMALHSQLAAAVDIVLVMKHTPFGRRLAQLGVLRGNPVTTQVVWDLDHGMHEGSEEAWFMP

SEQ ID NO: 63 - DNA, 2061 bp, Corynebacterium glutamicum
  CDS (101)..(2038): RXA01826
ctacacctaggacgagtgctagcgttccagttgagactaatgcaccggctgatgatttaatcgacgccgtaaatggcctattggatgtaggaggagcgcagtgaccttcgtgatcgctgatcgctatgaactggatgccgtcatcggctccggtggcatgagcgaggtgttcgcggccaccgacacgctcattggtcgggaggtcgcggtaaagatgctgcgcatcgaccttgcgaaagatcccaatttccgagaacgcttccgcagggaagcccaaaactccggaaggttgagccactcttcgatcgtcgctgtttttgacaccggcgaagtagacaaagacggcacctctgttccctacattgtgatggaacgcgtgcagggtcgaaacctgcgcgaagttgtcaccgaagacggcgtattcaccccagttgaggcagccaacatcctcatccctgtgtgtgaagcgctgcaggcatcccatgacgccggcattattcaccgcgatgtgaaacccgccaacatcatgatcaccaacaccggtggcgtgaaagtcatggacttcggcatcgcccgcgcggtcaacgattccacctccgccatgactcaaacctccgcagtcatcggcaccgcccagtacctctcccctgagcaggcccgcggcaaacccgccgatgcgcgttccgatatttacgccaccggctgcgtcatgtacgaattagtcaccggtaagccaccttttgaaggcgagtcccctttcgccgtggcctaccaacacgtccaggaagaccccacccctccttcggatttcatcgcggacctcaccccgacctctgctgtcaacgtggatgccgtggtactcaccgccatggcaaaacaccccgccgaccgctaccaaacagcctccgaaatggccgctgacctgggccggctatcccgcaatgcagtctcccatgccgcacgcgcgcatgtagaaacagaagaaaccccagaagagcccgaaactcgcttctcgacgcgcacctccacccaagtggcccccgccgcaggcgtggctgcggccagtacggggtcagggtcttcttcgcgtaaacgtggatccagaggcctcaccgccctggccatcgtgttatccctaggtgtcgtcggcgttgccggtgccttcacctacgactactttgccaacagctcctccactgcaaccagcgcgatccccaatgtggaaggcctcccgcagcaagaagctctcacagaacttcaagcagcaggatttgttgtcaacatcgtcgaagaagccagcgccgacgtcgccgaaggcctcgtcatccgagcaaacccaagcgttggatccgaaatccgccaaggggccaccgtcaccatcaccgtgtccaccggccgagaaatgatcaacatcccagacgtctccggcatgacacttgaggacgccgcccgcgccctcgaagacgttggtctcatactcaaccaaaacgttcgggaagaaacctccgacgacgtcgaatctggcctcgtcatcgaccaaaaccccgaagccggccaagaagtagtcgtgggttcctctgtatctctaaccatgtcttcaggcaccgagagcatccgagtgcccaacctcaccggcatgaactggtcacaagcagaacaaaacctcatctccatgggctttaaccccacagcttcctacttagacagcagcgaaccagaaggcgaagtcctctcagtttccagccaaggaactgaactacccaagggttcatccatcacagtggaagtctccaacggcatgctcatccaagcccccgatctcgcccgcatgtccaccgaacaggccatcagtgccctccgcgctgctggctggaccgccccagatcaatccctgatcgtcggcgaccccatccacaccgcagccctcgtggatcaaaacaaaatcggattccaatccccaacccctgcaaccctcttccgcaaagacgcccaagtgcaagtgcgactcttcgaattcgatctcgctgcactcgtgcaatagccaacaaggaaaccgtcaag

SEQ ID NO: 64 - protein, 646 aa, Corynebacterium glutamicum
VTFVIADRYELDAVIGSGGMSEVFAATDTLIGREVAVKMLRIDLAKDPNFRERFRREAQNSGRLSHSSIVAVFDTGEVDKDGTSVPYIVMERVQGRNLREVVTEDGVFTPVEAANILIPVCEALQASHDAGIIHRDVKPANIMITNTGGVKVMDFGIARAVNDSTSAMTQTSAVIGTAQYLSPEQARGKPADARSDIYATGCVMYELVTGKPPFEGESPFAVAYQHVQEDPTPPSDFIADLTPTSAVNVDAVVLTAMAKHPADRYQTASEMAADLGRLSRNAVSHAARAHVETEETPEEPETRFSTRTSTQVAPAAGVAAASTGSGSSSRKRGSRGLTALAIVLSLGVVGVAGAFTYDYFANSSSTATSAIPNVEGLPQQEALTELQAAGFVVNIVEEASADVAEGLVIRANPSVGSEIRQGATVTITVSTGREMINIPDVSGMTLEDAARALEDVGLILNQNVREETSDDVESGLVIDQNPEAGQEVVVGSSVSLTMSSGTESIRVPNLTGMNWSQAEQNLISMGFNPTASYLDSSEPEGEVLSVSSQGTELPKGSSITVEVSNGMLIQAPDLARMSTEQAISALRAAGWTAPDQSLIVGDPIHTAALVDQNKIGFQSPTPATLFRKDAQVQVRLFEFDLAALVQ

SEQ ID NO: 65 - DNA, 2271 bp, Corynebacterium glutamicum
  CDS (101)..(2248): RXA02699
ttgtgtaccttccgacatactggaacgcatggcaaacttgaaggtcggtgacgttttagaggacaggtatcggattgaaactccgattgcccggggtggtatgtctaccgtgtacaggtgccttgatcttcgtttaggacgttccatggcgcttaaagtcatggaagaagatttcgttgatgatcccattttccggcagcgttcccgtagggaagctcggtcaatggcgcagctaaatcatccaaatttggtcaatgtgtatgatttttccgctactgacggtttggtgtatctggtgatggagttaatcactggtggcaccttgcgtgagttgctggctgagcggggacctatgcccccgcatgctgctgtgggcgttatgcgtggggtgctcacgggtctcgcggctgcccaccgggcgggcatggtgcaccgggatatcaagcctgacaacgtgttgatcaatagtgatcaccaggtgaaactgtctgatttcggcttggttcgagcggctcacgccggccagtctcaggacaatcagattgtgggcacggtggcttatctttcccctgagcaggttgagggcggtgagatcgggccggccagcgacgtgtattcggcaggcattgtgctctttgagctgctcacaggcaccacgcctttttcgggcgaggatgatctcgaccatgcatacgcccgccttacggaagtcgtgccggcaccgagttcgcttatcgacggcgtcccctccctcatcgatgagcttgtcgcgacagctacctccattaatcctgaggatcgtttcgatgattctggagagtttttgtccgcactggaagatgtcgcaacagagttgagcttgccggctttccgggtccctgtgccggttaattccgcagccaatagggctaatgcccaggtcccggatgctcagccaactgatatgtttaccacccatatccccaagactcctgagcctgatcacactgcgatcattccggtggcctcagcaaatgagacgtcgattctgcctgcgcaaaacatggcacaaaatatggcgcagaatccgctgcaacctccggaacctgatttcgccccggagccacctccggacacagcgctgaatattcaagatcaagagcttgcgcgcgccgatgagccagaaattaataccgtcagcaatcgttccaaattgaagctgacgttgtggtcaattttcgtggtcgcagtgatcgctgctgttgctgttggcggttggtggttcggttcaggccgttacggtgagattccgcaggtgttgggcatggatgaggtccaggcagtagctgttgtagaggaagctggtttcgtggcagtggctgaacctcagtatgacaatgaggttcccactggttcgattattgggactgaaccttcttttggtgagcgccttcctcgcggcgaggatgtttctgtcctcgtctctcaagggcgtcccgtggtgccggatcttagcgaggatcgatccttaagcaccgttcgtgaagagttggaacagcgcacgttcgtctgggttgatggcccaggtgaatattctgacgatgttccagaaggacaagtagtttcttttacaccgtcgtcaggcacgcagcttgatgttggtgaaaccgtgcagatccatttgagccgaggccccgccccggttgagattcctgatgtctctggcatgggagtggatcaggcaacacgtgtgttggagcgcgcaggtttgagcgtcgagcgtactgaagaaggctttgatgctgagacaccaaatggtgatgtctacgggacttcgcccaaggtatctactgaggtcaagcgcggaacctctgttgtgctgcaggtgtccaatgctatttcggtaccggatgtggtgggtatgaccaaggacgaagccaccgcggcgcttgcggaagaaggattggtcgtggcgtcgacaagcattattcctggtgaggcggcgagctccgctgacgccgtcgtgaccgtcgagcctgaatccggcagccgcgttgatccagcgcatccgcaggtcagcctcgggttagctggggagattcaagttccaagcgtggttggacgtaaggttagcgatgctcgaagcattctggaagaagccggtttaacgctgacaactgatgcggacgacaacgatcgaatttatagtcaaacccctcgtgcacgcagcgaagtctcggtagggggagaagttacagtaagggcgttttagtggttccctcgttgcagcaa

SEQ ID NO: 66 - protein, 716 aa, Corynebacterium glutamicum
MSTVYRCLDLRLGRSMALKVMEEDFVDDPIFRQRSRREARSMAQLNHPNLVNVYDFSATDGLVYLVMELITGGTLRELLAERGPMPPHAAVGVMRGVLTGLAAAHRAGMVHRDIKPDNVLINSDHQVKLSDFGLVRAAHAGQSQDNQIVGTVAYLSPEQVEGGEIGPASDVYSAGIVLFELLTGTTPFSGEDDLDHAYARLTEVVPAPSSLIDGVPSLIDELVATATSINPEDRFDDSGEFLSALEDVATELSLPAFRVPVPVNSAANRANAQVPDAQPTDMFTTHIPKTPEPDHTAIIPVASANETSILPAQNMAQNMAQNPLQPPEPDFAPEPPPDTALNIQDQELARADEPEINTVSNRSKLKLTLWSIFVVAVIAAVAVGGWWFGSGRYGEIPQVLGMDEVQAVAVVEEAGFVAVAEPQYDNEVPTGSIIGTEPSFGERLPRGEDVSVLVSQGRPVVPDLSEDRSLSTVREELEQRTFVWVDGPGEYSDDVPEGQVVSFTPSSGTQLDVGETVQIHLSRGPAPVEIPDVSGMGVDQATRVLERAGLSVERTEEGFDAETPNGDVYGTSPKVSTEVKRGTSVVLQVSNAISVPDVVGMTKDEATAALAEEGLVVASTSIIPGEAASSADAVVTVEPESGSRVDPAHPQVSLGLAGEIQVPSVVGRKVSDARSILEEAGLTLTTDADDNDRIYSQTPRARSEVSVGGEVTVRAF

SEQ ID NO: 67 - DNA, 549 bp, Corynebacterium glutamicum
  CDS (101)..(526): RXA00319
accgcagaagaattagaaaggatcatccatgactgggcctaaaacttcgctacctgtggaaattgttttcgtatgcaccggaaacatttgccgatcccccatgtcggaagtcatcgcgaaggcaaaagcggaagaagctggcttggaagacaacgtcattttctcctcctgtggcatgggcaattggcacgttggccaacctgctgacaagcgagctctcgcggaactgaaatcagccggttacaacggcgacacccaccgcgcagcacaacttggtcccgagcacatgcgcgcagatctcttcgtcgcgctagattccggccacgccggtgagctcgccgcaacgggtgttcccaacgacaaaatccgcctcatgcgttccttcgacccagagtccaaccccaccgacgatgtcgcagacccttactacggcacatcccaggatttcgtgctcacccgtgaaaacatcgaagatgctatgccgggccttttggagtgggtcagagatcacatccgcactgattcttaggtctttgagctaaaaagtcc

SEQ ID NO: 68 - protein, 142 aa, Corynebacterium glutamicum
MSEVIAKAKAEEAGLEDNVIFSSCGMGNWHVGQPADKRALAELKSAGYNGDTHRAAQLGPEHMRADLFVALDSGHAGELAATGVPNDKIRLMRSFDPESNPTDDVADPYYGTSQDFVLTRENIEDAMPGLLEWVRDHIRTDS

SEQ ID NO: 69 - DNA, 726 bp, Corynebacterium glutamicum
  CDS (101)..(703): RXA01272
tatggctacggaaattacggctacggcgacacctccaaaatcaatgcccctaagcccgacaacaccgaactaaccaccaccgatgcttccaaggccaacaatgagcaatagcttcactattctcactgtctgtactggaaacatttgccgctccccgttagctaagcagctacttgaacttgagcttccgggggcagatataatccgcgttgattccgccggtgttcaggcgatggttgattcgcctatgccggagcaatctttagaaatcgcacgtaaacagggcatagaaaaccctgaggagcaccgagctaagcagattactgaggagcttgtaaaccaatctgatctgattcttgcgatggatcgggggcatcgaaaatccattgtccagctaagcccgcgtgcaacccgtaaggttttcactgttgttgatcttgccaggttaattgaggcaacaactgatgctgatctgcaggaagagctcaatctggcaggggattccgtgatcgataggctgcatgcgacagttgaggctgctcgtcttagccgcagtgaattgaatcctctggataacctcgcagatgaagatattgttgacccgtacggaaagagtcaatcggtttatgaggcatcggcgagtcagctaattccagctattcgtttgattgcttcttatttgaacaaagcactggagtctgcgtaatggcgaggaagtatcgggtg

SEQ ID NO: 70 - protein, 201 aa, Corynebacterium glutamicum
MSNSFTILTVCTGNICRSPLAKQLLELELPGADIIRVDSAGVQAMVDSPMPEQSLEIARKQGIENPEEHRAKQITEELVNQSDLILAMDRGHRKSIVQLSPRATRKVFTVVDLARLIEATTDADLQEELNLAGDSVIDRLHATVEAARLSRSELNPLDNLADEDIVDPYGKSQSVYEASASQLIPAIRLIASYLNKALESA

SEQ ID NO: 71 - DNA, 1476 bp, Corynebacterium glutamicum
  CDS (101)..(1453): RXA01830
acggcacttttgtcggtggtacgcgcattgatcagcctgagcagattgcggtgggcacggatatccgtattggtcgtacagcagtgaggcttgttccctgatgttgaaacttaaatatgcggtggcatctgaccgagggttagtgcgcgggaacaatgaggattccgcttacgctggcccgcatttgttggcgctggctgatggtatgggcggccatgctgctggtgagatcgcttcccaaaccatgatcaaccatttgcgtgcgcttgatgttgatcctggtgataacgatatgttggcgctggtgggcatggtggcaggcgaagccaacgcggcgattgctgagggcatcgccgaagacccggcgcgcgacggcatgggcactacgttgacggcgttcatgtttaacgggcgtgacctggcaatgtgccacgtcggcgatagtcgtggttatgtgcttcgcgacgataagttggtacaggttacagtcgacgatacttttgtgcagtcgttggtcgctgagggcaagcttgatccagaagatgtttcaactcaccctcagcgttctttgattctgaaggcttacaccggccatcctgtggagcccactctggagcaattcccggccttgcctggggatcgtttgttgttgtgctctgatggtctatcagatccggttacacactccacgattgaagaaacagtgcgtgtaggcaccccgcaggatgcgtccaccaagttggtggagttggcgctgcgttctggcggtccggacaatgtgacggtcattgtggccgatgttgtagaagtcaccgaggcggaagcagcagcggaagcatcagtgcctgtcacggctggtgcgctcaatggtgagcagcctgaagatccgcggcctgataccgctgcgggacgcgctgcggcgatcacacggcgagctcaagtgattgatccggcaccaaagatatctgatgctggaacggaggatattcccacaattgaggagccaccagagaaaagttccagcaaacttgcggtattgatcgtagccctggtcatcctcatcggtgtagttgccgcaggatggtggggctactcccgtattgacagcactttttacgtcgcggtcaatgatgaggaagccatcaccgtggaacacggtgtggattaccgcatctttggcaaggatttacattcgcaattccaggtggcgtgcctgaatgaagctggcaccttgtcactcaaggaatcctgtgaaaacggtacgtctttcaaattggatgatttaccggcatctgttcgcggtagtgtcgcaggattaccgtctgggtcgtatgacgaggtccaggcgcaaatgcaacggctggctgctcaagctttgccagtgtgcgtgaacttagaagtaacaaccggtggcgatagaaacgaacccggagtcaattgtagggaggtctcatgaacacgcttgaacgattaaag

SEQ ID NO: 72 - protein, 451 aa, Corynebacterium glutamicum
MLKLKYAVASDRGLVRGNNEDSAYAGPHLLALADGMGGHAAGEIASQTMINHLRALDVDPGDNDMLALVGMVAGEANAAIAEGIAEDPARDGMGTTLTAFMFNGRDLAMCHVGDSRGYVLRDDKLVQVTVDDTFVQSLVAEGKLDPEDVSTHPQRSLILKAYTGHPVEPTLEQFPALPGDRLLLCSDGLSDPVTHSTIEETVRVGTPQDASTKLVELALRSGGPDNVTVIVADVVEVTEAEAAAEASVPVTAGALNGEQPEDPRPDTAAGRAAAITRRAQVIDPAPKISDAGTEDIPTIEEPPEKSSSKLAVLIVALVILIGVVAAGWWGYSRIDSTFYVAVNDEEAITVEHGVDYRIFGKDLHSQFQVACLNEAGTLSLKESCENGTSFKLDDLPASVRGSVAGLPSGSYDEVQAQMQRLAAQALPVCVNLEVTTGGDRNEPGVNCREVS

SEQ ID NO: 73 - DNA, 2199 bp, Corynebacterium glutamicum
  CDS (101)..(2176): RXA02747
caccggcaaagtcggcgacggcaaagtgtggatgactaacatcgaagagctggttcgtgttcgtaccggtgagcgcggcgaagcagccctttaaaaacttatgaataatccagcccagctgcgccaagatactgaaaaggaagtcctggcgttgctgggctctttggttttacccgccggcaccgcgcttgccgccaccggatctttggccaggtccgaactcacgccgtattccgatttggacctcattttgatccatccaccaggagccaccccggatggcgtggaggatttgtggtacccgatttgggacgcaaaaaagcgtctcgactactccgtgcgcaccccagatgagtgtgtggctatgatttctgcggattccactgcagcccttgccatgcttgacctgcggtttgtcgctggcgatgaggatctgtgtgccaaaacgcgccggcgcatcgtggagaagtggcgccaggaactcaacaaaaacttcgatgccgttgtggacaccgcgattgcccgttggcgccgctccggacccgtcgtggcaatgacgcggccagatcttaaacacggcaggggagggctgcgcgatttcgaactgatcaaggccctcgcgctcggccacctatgcaaccttccacagcttgatgcgcaacaccagctgcttctcgacgcccgcaccttgctgcacgtccacgcgcgacgctcccgcgacgtccttgaccccgaatttgcggtggatgtggccatggatttgggctttgttgaccgctatcacctgggccgggagatcgccgatgcagcccgcgccattgatgatggcctgaccaccgcgctggccaccgcccgtggcattttgccacgtcgcacaggttttgcattcaggaatgcttctcgacgcccacttgatcttgatgtcgtcgacgccaacggcaccatcgaattgtccaaaaaaccagatcttaatgatcccgcacttccacttcgagtggccgcagccgcagcaaccaccggacttccggtggcagaatcaacctgggttcgacttaatgaatgcccgccacttcctgagccatggcctgccaatgcagcaggggacttctttcggattctctccagtccgaaaaactcacgccgagtggtgaaaaatatggatcgccacggattgtggtcgcgttttgttccagaatgggaccgcatcaaagggcttatgccccgtgaacccagccatatttccaccatcgatgaacatagtctgaacactgttgcaggatgtgcgctagaaactgtgaccgtcgcgcgccccgatcttttagttttgggagccttgtaccacgacattggcaagggcttcccgcgtccacacgaacaagtaggtgcagagatggtggcgagggctgcaagccgcatgggattgaaccttcgcgatcgtgccagcgtgcaaacgctggtcgccgagcacaccgcggtggccaaaatcgccgcgcgccttgatccctcctcggagggcgccgtcgataagctgcttgatgctgttaggtatgacctggtgacattgaatctgcttgaggtgctaacagaagctgatgcgaaagccacggggcctggcgtgtggacggcgcgtttggagcatgcgctgcggattgtgtgcaagcgtgcgcgtgatcgcctcaccgatattcgcccggttgcgccgatgattgcgccacgtagtgaaattggtttggtggaacgcgatggcgtgttcacagtgcaatggcacggcgaagacttacatcggattcttggcgtaatttatgccaaaggatggacaatcaccgcggcgcgcatgctggccaatggtcaatggagtgcggaatttgatgtccgcgcaaacggcccccaagattttgatccgcagcatttcctgcaggcatatcaatccggtgtgttttccgaggttcccattccagcacttgggataacagccacattttggcacgggaacactttagaagtgcgcactgagcttcgcacaggagctatttttgccctgctcagaacattgcccgatgccctctggatcaacgctgtgacccgcggtgcgaccctgattatccaggcagcactgaagcccggcttcgatcgagcaacggtggaacgctccgtagtcaggtcgttggcaggtagctgacgtgacctgagcgggggcaa

SEQ ID NO: 74 - protein, 692 aa, Corynebacterium glutamicum
MNNPAQLRQDTEKEVLALLGSLVLPAGTALAATGSLARSELTPYSDLDLILIHPPGATPDGVEDLWYPIWDAKKRLDYSVRTPDECVAMISADSTAALAMLDLRFVAGDEDLCAKTRRRIVEKWRQELNKNFDAVVDTAIARWRRSGPVVAMTRPDLKHGRGGLRDFELIKALALGHLCNLPQLDAQHQLLLDARTLLHVHARRSRDVLDPEFAVDVAMDLGFVDRYHLGREIADAARAIDDGLTTALATARGILPRRTGFAFRNASRRPLDLDVVDANGTIELSKKPDLNDPALPLRVAAAAATTGLPVAESTWVRLNECPPLPEPWPANAAGDFFRILSSPKNSRRVVKNMDRHGLWSRFVPEWDRIKGLMPREPSHISTIDEHSLNTVAGCALETVTVARPDLLVLGALYHDIGKGFPRPHEQVGAEMVARAASRMGLNLRDRASVQTLVAEHTAVAKIAARLDPSSEGAVDKLLDAVRYDLVTLNLLEVLTEADAKATGPGVWTARLEHALRIVCKRARDRLTDIRPVAPMIAPRSEIGLVERDGVFTVQWHGEDLHRILGVIYAKGWTITAARMLANGQWSAEFDVRANGPQDFDPQHFLQAYQSGVFSEVPIPALGITATFWHGNTLEVRTELRTGAIFALLRTLPDALWINAVTRGATLIIQAALKPGFDRATVERSVVRSLAGS

SEQ ID NO: 75 - DNA, 687 bp, Corynebacterium glutamicum
  CDS (101)..(664): RXA02210
ttcatggccaatgtggtggggtcctttctaatacgccaaatttttcaaacccatcctcttccatgcgtgttttcaccgctattttccataggagtacattgtgtccgtagcggcaggcgacaaaccaacaaatagccgtcaagaaatcctcgaaggtgcccgacggtgcttcgctgagcacggctatgaaggcgcaaccgtacgccgactggaagaagcaacaggtaaatcacgcggagcgatctttcatcacttcggtgacaaagaaaacctgttcctagccctcgcgcgggaagatgcagcccgcatggcggaggtggtgtctgaaaatggcctcgttgaagtgatgcgaggaatgctggaagatcctgaacgatatgactggatgtcagtacgcctggagatctccaagcagctgcgcaccgacccggtattccgcgcaaaatggattgatcaccaaagtgttctagacgaagctgtccgcgtgcgtttgtcccgcaacgtggataagggacaaatgcgcactgacgtcccgatcgaagtgctgcacaccttcttagagactgttctcgacggtttcatctcccgtcttgctaccggcgcatccacagaaggactgtccgaagtattggatctggtcgagggaactgtccgtaaacgcgactaaacgacccctgattcacactt

SEQ ID NO: 76 - protein, 188 aa, Corynebacterium glutamicum
VSVAAGDKPTNSRQEILEGARRCFAEHGYEGATVRRLEEATGKSRGAIFHHFGDKENLFLALAREDAARMAEVVSENGLVEVMRGMLEDPERYDWMSVRLEISKQLRTDPVFRAKWIDHQSVLDEAVRVRLSRNVDKGQMRTDVPIEVLHTFLETVLDGFISRLATGASTEGLSEVLDLVEGTVRKRD

SEQ ID NO: 77 - DNA, 342 bp, Corynebacterium glutamicum
  CDS (101)..(319): RXA00221
tcggcacgatcttgccggttttccttgtttaggctccgaaacggatgtatactgcaaagaacggcacgatcatgccgaaagttggatccaaaggatgcacatgaacgcagaagaaatcggaatggcgctgctcaacggacgcaaagagctaggccttagacaaggagagctcgcagacttagctggagtttctgaacgattcatccgcgatgtcgaaaagggaaaaactaccgtccgcctggacaaagtcatcgatgtactccgcgtccttggactcgagctttctgttggaattcacgatcccctcaaggttaatcaatgacccccactgccgatatctgg

SEQ ID NO: 78 - protein, 73 aa, Corynebacterium glutamicum
MNAEEIGMALLNGRKELGLRQGELADLAGVSERFIRDVEKGKTTVRLDKVIDVLRVLGLELSVGIHDPLKVNQ

SEQ ID NO: 79 - DNA, 594 bp, Corynebacterium glutamicum
  CDS (101)..(571): RXN00551
acttctcaagtgacgccaaggtaagttgtactttttctgtccaaattattgctttttccgtagataggttatcgaacggaaattacttggcaataccgctatgctggcaggcatgcctaatttaaacgctgaggagctagcagtccgcgtgcgacccgcgctgacaaaactctacgttctctatttccgccgctctgtgaattctgacctctcgggtccacagctcactattttgagtcgcctggaagaaaacggcccatcccgaattagtcgcatcgcggaacttgaagatattcgtatgccaaccgcttcgaatgctctgcatcagctggagcaactcaacctggttgagcgtatccgcgacaccaaagaccgccgaggcgtgcaggttcagctcactgatcatggacgcgaagagcttgagcgcgtgaacaatgaacgaaacgcagagatggctcgactccttgaaatgctcaccccagagcagctggaacgtaccgaagacctggtggatatcattactgagcttgcagaggtgtacggtagctggaaagagaccgacagcggttcttaacagttttctccatctcaact

SEQ ID NO: 80 - protein, 157 aa, Corynebacterium glutamicum
MLAGMPNLNAEELAVRVRPALTKLYVLYFRRSVNSDLSGPQLTILSRLEENGPSRISRIAELEDIRMPTASNALHQLEQLNLVERIRDTKDRRGVQVQLTDHGREELERVNNERNAEMARLLEMLTPEQLERTEDLVDIITELAEVYGSWKETDSGS

SEQ ID NO: 81 - DNA, 448 bp, Corynebacterium glutamicum
  CDS (101)..(448): FRXA00551
acttctcaagtgacgccaaggtaagttgtactttttctgtccaaattattgctttttccgtagataggttatcgaacggaaattacttggcaataccgctatgctggcaggcatgcctaatttaaacgctgaggagctagcagtccgcgtgcgacccgcgctgacaaaactctacgttctctatttccgccgctctgtgaattctgacctctcgggtccacagctcactattttgagtcgcctggaagaaaacggcccatcccgaattagtcgcatcgcggaacttgaagatattcgtatgccaaccgcttcgaatgctctgcatcagctggagcaactcaacctggttgagcgtatccgcgacaccaaagaccgccgaggcgtgcaggttcagctcactgatcatggacgcgaagagcttgagcgcgtgaacaatgaacgaaacgca

SEQ ID NO: 82 - protein, 116 aa, Corynebacterium glutamicum
MLAGMPNLNAEELAVRVRPALTKLYVLYFRRSVNSDLSGPQLTILSRLEENGPSRISRIAELEDIRMPTASNALHQLEQLNLVERIRDTKDRRGVQVQLTDHGREELERVNNERNA

SEQ ID NO: 83 - DNA, 588 bp, Corynebacterium glutamicum
  CDS (101)..(565): RXA01763
attttgaaaacttacatcgttcgcttgacgcacagaatgcatgcatgttcaaatgattgaagatcgaaactatttttcagccagttcacatggagccactatgaccaccagcaaccccaccgccgagatcattggcggaccagaacgattcctcgaggccgaattgtcccagcagattcaattcctcactgcccgcgcacgagccaagggatccgccaaaggaaacgaagccttagtcgacctcggacttaaagttcgccaatactccacactgtccctagcggccagcggattaaaaccaacccaacgagaattgggagcatttctcgacctagacccaagtcagattgttgccttggtcgatttcctagaaaagcgcggattagtggcccgggaagttgacccccgggataggcgctcgaagatcatcatcgccaccgaaaaaggtctggaaattcacgacgaagccaccaaacgcctcctcatcgccgagggtgaatctctaaaaaacctcacctccgacgagcaagaacaactaagggaactgctgctcaaaatcgccttttaagtctcttaaccacgccggcc

SEQ ID NO: 84 - protein, 155 aa, Corynebacterium glutamicum
MTTSNPTAEIIGGPERFLEAELSQQIQFLTARARAKGSAKGNEALVDLGLKVRQYSTLSLAASGLKPTQRELGAFLDLDPSQIVALVDFLEKRGLVAREVDPRDRRSKIIIATEKGLEIHDEATKRLLIAEGESLKNLTSDEQEQLRELLLKIAF

SEQ ID NO: 85 - DNA, 717 bp, Corynebacterium glutamicum
  CDS (101)..(694): RXA02667
gcgcagcagggtgaagtattaaataggtcgcttgcatggacaatgcgggcgccaccggctggttctagcaaaaatggaaccgccattagaaggagtgggaatggaattcaaggtcggagataccgtcgtttacccgcaccacggagctgcaattatttcagccctggagcagcgtgaaatgaatggtgagacggtggactacctggttctccagatcaatcattccgatctcgtcgttcgcgttccagcaaagaacgctgaactcgttggcgtgcgtgacgttgtcggcgaggagggcctgcagaaggttttctctgttcttcgtgaaattgacgtcgaagaagccggcaactggtcccgccgttacaaggctaaccaggagcgtttggcttccggtgacgtgaacaaggtcgctgaggttgtccgtgacctgtggcgtcgtgatcaggatcgtggcctttccgctggtgagaagcgcatgctctccaaggcgcgtcaggttcttgttggtgagctcgcgctcgccgaaaccgtggacgatgagaaggcggatgctttcctcagccaggtcgatgagaccattgctcgccaccgcgctgacctgctcggcgacgaggaagagaagaaggacgcattcgacgacttcgacgattccgacgtggatcttgacgatctgagcttcgacgacgaagattagacgcccatgtcgtctacacg

SEQ ID NO: 86 - protein, 198 aa, Corynebacterium glutamicum
MEFKVGDTVVYPHHGAAIISALEQREMNGETVDYLVLQINHSDLVVRVPAKNAELVGVRDVVGEEGLQKVFSVLREIDVEEAGNWSRRYKANQERLASGDVNKVAEVVRDLWRRDQDRGLSAGEKRMLSKARQVLVGELALAETVDDEKADAFLSQVDETIARHRADLLGDEEEKKDAFDDFDDSDVDLDDLSFDDED

SEQ ID NO: 87 - DNA, 479 bp, Corynebacterium glutamicum
  CDS (1)..(456): RXA00348
acccgcgagcgcctcgaaaacgcccaataccaggtacaacgcgaccgagtcaggggtgccatggaagtctttatcgaagcgggaatcgatcccggcaccgtgccgatcatggaatgctggatcaacaaccgccaacacaacttcgaagtggccaaagaacttctagaaacacacccagacctcaccgcagtactctgtaccgtcgatgcactggcattcggcgttctggaataccttaaaagcgtaggtaaatcagcgcctgcagatctatccctcactggtttcgatggcacccacatggcactcgcacgggatctcaccaccgtcatccaacccaacaaactcaaagggttcaaagccggcgaaacactgttgaaaatgattgacaaagaatacgtggaaccagaagtggaattggaaacttccttccacccaggttccacggttgcgccaatctaggcttgtggcacttttcgtgc

SEQ ID NO: 88 - protein, 152 aa, Corynebacterium glutamicum
TRERLENAQYQVQRDRVRGAMEVFIEAGIDPGTVPIMECWINNRQHNFEVAKELLETHPDLTAVLCTVDALAFGVLEYLKSVGKSAPADLSLTGFDGTHMALARDLTTVIQPNKLKGFKAGETLLKMIDKEYVEPEVELETSFHPGSTVAPI

SEQ ID NO: 89 - DNA, 567 bp, Corynebacterium glutamicum
  CDS (101)..(544): RXA01500
acaccctcacctggaattttgcagaaatagggcaagaatcaaaatagtgggaaatccccatgtttcgcgaagtcccattgttggagttaggcttatacccatggctacgcatccagatattcccacagagttgcttgaatctccgagctatcaacttgaacgacttcgacgacgcactcgtgaccatgttgaggccgaattggccaagcatgagaccacgatgagggaattctggacgcttacatgtctggttcattccgacgctgcaagccagtcagttctgtgtgagctgctggccattgatgcatcggatatggtcagactcgttgactcacttgaggtacgcggctgggcgaaaagggaacgtgatcccaaagaccgtcgtcgccaaattgttgcgtcaacgaagaagggaaaaaacgcccaggcggatctgcacaaagttgtgcttgaggcagaggatgctgcgttggatgagtctacgtccaagcagttgaagcaccttcgtaaattggccgcagcaattatctccaccgaagaggactaaatataacgtggcattgagca

SEQ ID NO: 90 - protein, 148 aa, Corynebacterium glutamicum
MATHPDIPTELLESPSYQLERLRRRTRDHVEAELAKHETTMREFWTLTCLVHSDAASQSVLCELLAIDASDMVRLVDSLEVRGWAKRERDPKDRRRQIVASTKKGKNAQADLHKVVLEAEDAALDESTSKQLKHLRKLAAAIISTEED

SEQ ID NO: 91 - DNA, 272 bp, Corynebacterium glutamicum
  CDS (37)..(249): RXA01125
atcggattctccacggaactggaatcggtgatctaaatggccatcatcgtcgacatcgatgtcatgctcgcccgccgcaaaatgggcgtcggcgaactcgccgaaaaaatcggcatcaccccagccaacctctcggtcttaaaaaacgggcgcgcaaaagcgatacgcttcagcacattggaggccatttgccgcgagctcggctgccagccgggcgacattttgcgttacgacgcctccctccacaactaaacccgaaacgcaaagagccc

SEQ ID NO: 92 - protein, 71 aa, Corynebacterium glutamicum
MAIIVDIDVMLARRKMGVGELAEKIGITPANLSVLKNGRAKAIRFSTLEAICRELGCQPGDILRYDASLHN

SEQ ID NO: 93 - DNA, 804 bp, Corynebacterium glutamicum
  CDS (101)..(781): RXN00822
cagttaggtgtcatccggattttatctcaaaccctaacaccccaggtgttgccactcatccggactcaaacaagatgtgtgcagatgaaggagaaaagcagtggaaggtgtacaggagatcctgtcgcgcgccggaatttttcaaggcgttgacccaacggcagtcaataacctcatccaggatatggagaccgttcgcttcccacgcggagcaaccatcttcgacgagggcgagccaggtgaccgcctttacatcatcacctccggcaaagtgaagcttgcgcgccacgcaccggacggccgcgaaaacctgctgaccatcatgggtccttccgacatgttcggtgagctctccatcttcgacccaggcccacgcacctcctctgcagtgtgtgtcaccgaagttcatgcagcaaccatgaactctgacatgctgcgcaactgggtagctgaccacccagctatcgctgagcagctcctgcgcgttctggctcgtcgtctgcgtcgcaccaacgcttccctggctgacctcatcttcaccgacgtcccaggccgcgttgctaagacccttctgcagctggctaaccgcttcggcacccaagaagctggcgcgctgcgcgtgaaccacgacctcactcaggaagaaatcgcacagctcgtcggtgcttcccgtgaaactgtgaataaggctcttgcaacgttcgcacaccgtggctggatccgcctcgagggcaagtccgtcctcattgtggacaccgagcatttggcacgtcgcgctcgataatcaccaaagcgctaaaaagc

SEQ ID NO: 94 - protein, 227 aa, Corynebacterium glutamicum
VEGVQEILSRAGIFQGVDPTAVNNLIQDMETVRFPRGATIFDEGEPGDRLYIITSGKVKLARHAPDGRENLLTIMGPSDMFGELSIFDPGPRTSSAVCVTEVHAATMNSDMLRNWVADHPAIAEQLLRVLARRLRRTNASLADLIFTDVPGRVAKTLLQLANRFGTQEAGALRVNHDLTQEEIAQLVGASRETVNKALATFAHRGWIRLEGKSVLIVDTEHLARRAR

SEQ ID NO: 95 - DNA, 804 bp, Corynebacterium glutamicum; identical to SEQ ID NO: 93
  CDS (101)..(781): FRXA00822

SEQ ID NO: 96 - protein, 227 aa, Corynebacterium glutamicum; identical to SEQ ID NO: 94

SEQ ID NO: 97 - DNA, 444 bp, Corynebacterium glutamicum
  CDS (101)..(421): RXN00849
gcaaagctttcgcctgctgattgaccatattgagtcgcagtgactcaagtttccaggtaaactgggaacaaattttagggaaagggagttgaacctaacgatggttacttatacaacccttctagacaagccgatttcagaatctgccccacggaaagctccagagccacttctccgcgaagctctgggtgcagctcttcgttctttccgtgctgacaagggcgttactttgcgtgagctggcggaagcttcacgtgtgtcacctggttatctttcagaattggaacgcggccgcaaagaggtgtcctctgagcttcttgcctccgtgtgccacgctttgggggccagcgttgcggatgtgttgatcgaagctgcaggttccatggcgctgcaagcagcgcaggaagacctcgctcgcgtctaagcgcatgggtgggcgtcgaa

SEQ ID NO: 98 - protein, 107 aa, Corynebacterium glutamicum
MVTYTTLLDKPISESAPRKAPEPLLREALGAALRSFRADKGVTLRELAEASRVSPGYLSELERGRKEVSSELLASVCHALGASVADVLIEAAGSMALQAAQEDLARV

SEQ ID NO: 99 - DNA, 444 bp, Corynebacterium glutamicum; identical to SEQ ID NO: 97
  CDS (101)..(421): FRXA00849

SEQ ID NO: 100 - protein, 107 aa, Corynebacterium glutamicum; identical to SEQ ID NO: 98

SEQ ID NO: 101 - DNA, 492 bp, Corynebacterium glutamicum
  CDS (101)..(469): RXA02698
catcctgttttcaaaggtcaagaaggtgctttcattcccggcacgcgcagaaataccctaaagattctccattagagctcgaaccagctaaattaagactgtgagttccaacaatgaatcttccttcgccctgcccgacaatgaaccattgctgacccttccggagacagccgagcgcctcggcgttgttgtcaccaaggtgatggatctggtcaatgaacacaaattgatcgtggtccggcgcgacggtattcgctacattccagaagctttcctgagcaccaagaaggaaaacaccaaccgtttcatccctggagttattgccttgcttgccgacggtggcttcagcgacgaggaaatcctcgcgttcctgtttaccgaagacgagacccttcctggtcgccccatcgatgcacttcatggccagttggctcgtgaagttatgcgacgcgctcaagcaatggcgttctaagcgctttctaaaagatctaa

SEQ ID NO: 102 - protein, 123 aa, Corynebacterium glutamicum
VSSNNESSFALPDNEPLLTLPETAERLGVVVTKVMDLVNEHKLIVVRRDGIRYIPEAFLSTKKENTNRFIPGVIALLADGGFSDEEILAFLFTEDETLPGRPIDALHGQLAREVMRRAQAMAF

SEQ ID NO: 103 - DNA, 450 bp, Corynebacterium glutamicum
  CDS (101)..(427): RXA00350
agattcggtaataaaaggtaaaaatcaacctgcttaggcgtctttcgcttaaatagcgtagaatatcgggtcgatcgcttttaaacactcaggaggatccttgccggccaaaatcacggacactcgtcccaccccagaatcccttcacgctgttgaagaggaaaccgcagccggtgcccgcaggattgttgccacctattctaaggacttcttcgacggcgtcactttgatgtgcatgctcggcgttgaacctcagggcctgcgttacaccaaggtcgcttctgaacacgaggaagctcagccaaagaaggctacaaagcggactcgtaaggcaccagctaagaaggctgctgctaagaaaacgaccaagaagaccactaagaaaactactaaaaagaccaccgcaaagaagaccacaaagaagtcttaagccggatcttatatggatga

SEQ ID NO: 104 - protein, 109 aa, Corynebacterium glutamicum
LPAKITDTRPTPESLHAVEEETAAGARRIVATYSKDFFDGVTLMCMLGVEPQGLRYTKVASEHEEAQPKKATKRTRKAPAKKAAAKKTTKKTTKKTTKKTTAKKTTKKS

SEQ ID NO: 105 - DNA, 495 bp, Corynebacterium glutamicum
  CDS (1)..(495): RXA02830
ctggaagacagccttggcgtgtcgctgtttgaacgggccgggcgcgggctggcgctgacaggggcgggcgatcagcttttgtcgcaggcgcgccgcctgatcgccctgaacgacgaggtatacgcccgcttgaacgccggtgcctacgagggcgaggtgacgctgggcgtgcctcaagacgtgatctaccccgtcatcccgcgcgtcttgcagcaattcgcccgcgattttccccgcgtgcaaattcacctgatctcgaacttcacgctgatgctgaaagaacagttccgccgcggcgaaatcgacgtgatgctgacgaccgaggacgagctgggcgagggcggcgagacgctggcccagcgcgagctgatctgggtcggcgcaccgggcgggtcggcgtggacccgcaggccgctgcccttggcgtttgaacgcgcctgcattttccggtctttcttgcagcgccgcttggatgccaacagcatctattggcaa

SEQ ID NO: 106 - protein, 165 aa, Corynebacterium glutamicum
LEDSLGVSLFERAGRGLALTGAGDQLLSQARRLIALNDEVYARLNAGAYEGEVTLGVPQDVIYPVIPRVLQQFARDFPRVQIHLISNFTLMLKEQFRRGEIDVMLTTEDELGEGGETLAQRELIWVGAPGGSAWTRRPLPLAFERACIFRSFLQRRLDANSIYWQ

SEQ ID NO: 107 - DNA, 459 bp, Corynebacterium glutamicum
  CDS (101)..(436): RXA00947
caacgagtttgatcgtacaactagcttggcttgagggcaaggtacgattagagtcgtacctaaattcaatactgttttacgagatcatttggagggtgtcatggcccgcaaattggaacatccatctttggccgagatgaatttaaatgccatcatgtttgcgctgtcggatcctattaggcgacaaatcctgtcgcagctgtcgtgcggacataatgatcaggcatgtgttgccttcgagcttccagtatctaaatccacctcaacgcaccacttccgcgtactccgtgaggcgggtctgattactcagcgctatgaaggaactgccattctaagtgcgctgcgcagcgaagatatggaagcgcgttttccgggactgctgacttctgtcatgcgagcggaagtggaagagcgcaacgcagctgacttgcccgtttaggacggttagcaagtattatc

SEQ ID NO: 108 - protein, 112 aa, Corynebacterium glutamicum
MARKLEHPSLAEMNLNAIMFALSDPIRRQILSQLSCGHNDQACVAFELPVSKSTSTHHFRVLREAGLITQRYEGTAILSALRSEDMEARFPGLLTSVMRAEVEERNAADLPV

SEQ ID NO: 109 - DNA, 828 bp, Corynebacterium glutamicum
  CDS (101)..(805): RXA01836
agaggcataaatgtcacctcccgcccaaaatctttttatacccccacacacagtgaatcccttcaccacgtctcattgggtgaaatgctaaattcaaggtatgggacagcaagaaattatcgaggactccaccgagagcggtattaaggttttagaccgcactgtattaatcctcaatgtcatcgcagaacagcctcgatcgttggcagagctcgcagctgccaccgatctgcccagggctacagcccaccgcctcgcctcagcgcttgaggtacacggcatgttggcacgctcccgcgataatagatggaccatcggcgcacggcttgcctcattgggtgcacgcggcgctgacaccctcatcgatacggccgtaccaattatggccgaccttatggagcgcaccggcgaatccgttcagctttatcgcctcaccggcaccacccgcacgtgtgtggccagccaagagcccagctccgggctaaaaaacgtggttcccgtgggcactcgcatgcctttaaatgcagggtcagcagcgcgcgtttttgccgcctacctccccatcccctctgccagcgtcttttcccgcgaggagcttgaccaggtgcgcgccagcggcttagcggagtccgtgggcgagcgtgagctcggccttgctagcctctcctcccctgtttttgattccaacggatccatgatcgcggcactgtccatctccggcgtggccgagcgcctcaagccccaccccgccgccatgtggggcaccgagcttatcgacgccgccgagcgcctaggcgctttgctttaagagcttttcgacgcacaacc

SEQ ID NO: 110 - protein, 235 aa, Corynebacterium glutamicum
MGQQEIIEDSTESGIKVLDRTVLILNVIAEQPRSLAELAAATDLPRATAHRLASALEVHGMLARSRDNRWTIGARLASLGARGADTLIDTAVPIMADLMERTGESVQLYRLTGTTRTCVASQEPSSGLKNVVPVGTRMPLNAGSAARVFAAYLPIPSASVFSREELDQVRASGLAESVGERELGLASLSSPVFDSNGSMIAALSISGVAERLKPHPAAMWGTELIDAAERLGALL

SEQ ID NO: 111 - DNA, 777 bp, Corynebacterium glutamicum
  CDS (101)..(754): RXA00292
gggctttggctagatcacatggtggcgatgtctgggtgattgatagaggaaccgaagatggcgctgtatttggagtgaaactaccgggagtaatggagtaatggatcaaacacttaaagttttagtaattgatgatgatttccgcgtcgccggcattcacgcctccatcgttgatgcgtcccctggattttcggtggtcggtaccgcgcgtaccctcgcagaggcaaaaaccctgatcgccacattttccccggatctcctacttgttgatgtctacctccccgacggcgatggcattgacctcgtgggcacctccaatattgatgcgtttgtgctcagcgcagccgatgacatcaaaacagttcgacgcgccatgcgtgccggggcactcggatatctgctcaaaccatttccccaaaaacgtctcgtggaacgccttgaccgttacgtccgctaccgccatgtcttatccggcacccaaggactttcccaagacaaaattgaccaggcaaccgcaatcctcaacggcacccaagcgccggtcaccgtctctagatccgccacagagcaattacttctcgacgccctggaaggccaagaactctccgcaacagaagcttccgaagctgccggagtttcacgtgccacagcacagcgcaggctggcagcgatggctagccaaggtgtgatccaggttcgccttcggtacggacagtccgggcgaccagaacatctatattcaaagccactgctctagtaacctttgtggatgtccac

SEQ ID NO: 112 - protein, 218 aa, Corynebacterium glutamicum
MDQTLKVLVIDDDFRVAGIHASIVDASPGFSVVGTARTLAEAKTLIATFSPDLLLVDVYLPDGDGIDLVGTSNIDAFVLSAADDIKTVRRAMRAGALGYLLKPFPQKRLVERLDRYVRYRHVLSGTQGLSQDKIDQATAILNGTQAPVTVSRSATEQLLLDALEGQELSATEASEAAGVSRATAQRRLAAMASQGVIQVRLRYGQSGRPEHLYSKPLL

SEQ ID NO: 113 - DNA, 3225 bp, Corynebacterium glutamicum
  CDS (101)..(3202): RXA00182
cagtggtgatttttcaaataaccggtaggctggagtacttgtccaatggtttcgcacaaggttacgagaaaccactcttcaacataggtgaaatgaattcatgacttctcacttgcttcacggtctctggatcaaagatcgcggtctgcaactgtggattgagcaggtcgaagggcaccgaattgtgcttccagaggcggtggaaaaaggcacgttcccgccggtagtggagcaaatcctcgacgggaaaaccttccgcgcgcgcatgaatgtgcatctgcgcactccgaaagggcgccatgttgagctgcccacgccaacagcagcttttacccctgaagaagcagtcacggttttctcacaattaagttttttgaaagcagaaacccctgccgccacccgagcgcaacgtgactccattgcgcccgatctgtggtggctgattgtcatgtatcaaggcctggcgcgttttgtgcaggccggccgcgtcacgcttcgcacggtgatgatggataatgcctggtggccccagtggcaactatctgccagcctgtcggagcgtgggtggctcgcggaaatgaaccatgccgcgccgggtattttgcggattaatggtggccgagatttggccggaagcatgtccaatgagcttccgcactggatcgccaacgccattttgcgtgattaccgcgatgaaaccatgccgtatgcgcgccatgagtttgttgaggcgttgctgtttaaccattcgctgcgcaagggctcgaccatgctcacccatgcgctgaatcagtggaaaaacaccattacatctgcgtctttgcagctggtgattttggtggaggagccccctgcggaatcggattatgaagatccgatggattccgtgtggccggtgcgtttgatggtgcgcacgggcgtggatgcgccgcaggcgattcaaaaaggatcgatcgatagcgggggaatggagcaactgcgctcccaatacgaaaccgcaaaaaccacctccatgctgctggatcctgcgcgcgaagacgcgatgctggggcatatggtggacatcgcccaaaacggtgactgggatattttcttaaccaccgaggagatcgtcaactttatctcccacgatgtagccaagctgcgcaaagccggcattcccgtcatgctgcccaaagcctggagcacctatgaaacccgcgcgcaggtggaagcgcgcacgccgaatgatgccgcggactcttcaaccaaggcaatcattggtcttgaccagctcgtggaatacaactggcgcatcagcgtcggcgatattcagctgtccgacgaagagatgcgcgaactcatcgattccaaaacaggcctcatccgcctgcgcggcgattgggtcatggcggaccaagacgcgttgcgacgcatcaccagctacatggaggaactatcaaagtcctccgaaaaacgcgcgcgcaccgaaatggaaaaagtggccatgcaggccaaactcgccgaagcaaacggcgaagaaggttggcaactcctggctgccaaggctgaaactctccgcaaggaattcaatgagaaattcagtggcgatggacaaggcgaagtaacccttgctgaactgcgcgaaatcgcactgaaagccgccgaaaacgaaccagtggaattcaccggctcgcaatggttcaactccttgctcggcggcaccgaaacacccgcgccggtgcgcgtcgacatccccgacacggtccttgctgacctgcgcgaataccagcgacgcggcgtggactggctgtactggatgtccgcaaataatttaggtgcagtgcttgccgacgacatgggcttgggaaaaaccctccagttgttgtcccttttggcagtcgagcgcgcagaaaacccagagttggaacgcggcccgacgctcgtggtgtgcccaacatctgtggtgggaaactgggcagccgaggcggctaaatttgtgccttcactaaaggtattgatgcatcacggcccgcagcgtttgaatgatgccgatttcctgagtcaatccaagggcatggacttgattatcacctcatacggtgtgatcacccgcgatttcaaactcatgggccaggtaggttttgaacgcgtcgtgctcgatgaagcgcaggcaattaaaaactcttccacacgcgtatcaaaggcagtgcgctcgttgccttcccgccaccgcgttgcactgactggcacgcccgtggaaaaccgcctgtctgaaatgcgctccatcttggacttctgcaaccccggcgtgctgggttctgcatcgtttttccgcaaccactttgccaaggccattgagcgtgaacaagacgacaccatgactgagcgcctccgccagctcaccgcaccgtttattttgcgacgcctcaaaaccgacccgaatatcatcgacgatctgcctgagaaaaccgaacagatcatccgcgtggatatgaccaccgaacaggcatctctgtacaaagcgctggttgaagatgtgcagaaacaactcgatgaacgccaaggaatgtcacgtaaaggcctggtcctggcgaccatcacgcgcatcaagcagatctgtaaccacccagcgcacttccttggcgacggctcagaggtgacactgaaaggtaaacaccgttccggcaaggtggaagcgctcatggaactgatcgatacggcagtaaaagaagagcgccgcatgctgatcttcacccagtacgcagcctttggccgtattttggcgccgtacctgtctgatcgattgggcacgaatatcccattcctgcacggcggcgtgaccaaaccaggacgcgaccgcatggtggcggaattccaatccgaagacggaccaccggcaatgatcctgtctttgaaagccggcggtactggcttgaacctgacagctgcatccatcgtggtccacatggatagatggtggaacccagccgtggaaaaccaagcaactgaccgtgccttccgcatcggccagcgcaaaaacgtggatgtatacaagatgatcacagtcggaaccatggaggaatccatccaagatatcctcgatggaaaaacacacctggccagcgccatcgtgggcgagggcgaaggctggatcaccgaactcaacccagaagaattggctatgctgatgagttaccgcgaaaaggagggtgcagatgactgaatcacgccgcgtgaaaatgg

SEQ ID NO: 114 - protein, 1034 aa, Corynebacterium glutamicum
MTSHLLHGLWIKDRGLQLWIEQVEGHRIVLPEAVEKGTFPPVVEQILDGKTFRARMNVHLRTPKGRHVELPTPTAAFTPEEAVTVFSQLSFLKAETPAATRAQRDSIAPDLWWLIVMYQGLARFVQAGRVTLRTVMMDNAWWPQWQLSASLSERGWLAEMNHAAPGILRINGGRDLAGSMSNELPHWIANAILRDYRDETMPYARHEFVEALLFNHSLRKGSTMLTHALNQWKNTITSASLQLVILVEEPPAESDYEDPMDSVWPVRLMVRTGVDAPQAIQKGSIDSGGMEQLRSQYETAKTTSMLLDPAREDAMLGHMVDIAQNGDWDIFLTTEEIVNFISHDVAKLRKAGIPVMLPKAWSTYETRAQVEARTPNDAADSSTKAIIGLDQLVEYNWRISVGDIQLSDEEMRELIDSKTGLIRLRGDWVMADQDALRRITSYMEELSKSSEKRARTEMEKVAMQAKLAEANGEEGWQLLAAKAETLRKEFNEKFSGDGQGEVTLAELREIALKAAENEPVEFTGSQWFNSLLGGTETPAPVRVDIPDTVLADLREYQRRGVDWLYWMSANNLGAVLADDMGLGKTLQLLSLLAVERAENPELERGPTLVVCPTSVVGNWAAEAAKFVPSLKVLMHHGPQRLNDADFLSQSKGMDLIITSYGVITRDFKLMGQVGFERVVLDEAQAIKNSSTRVSKAVRSLPSRHRVALTGTPVENRLSEMRSILDFCNPGVLGSASFFRNHFAKAIEREQDDTMTERLRQLTAPFILRRLKTDPNIIDDLPEKTEQIIRVDMTTEQASLYKALVEDVQKQLDERQGMSRKGLVLATITRIKQICNHPAHFLGDGSEVTLKGKHRSGKVEALMELIDTAVKEERRMLIFTQYAAFGRILAPYLSDRLGTNIPFLHGGVTKPGRDRMVAEFQSEDGPPAMILSLKAGGTGLNLTAASIVVHMDRWWNPAVENQATDRAFRIGQRKNVDVYKMITVGTMEESIQDILDGKTHLASAIVGEGEGWITELNPEELAMLMSYREKEGADD

SEQ ID NO: 115 - DNA, 1077 bp, Corynebacterium glutamicum
  CDS (101)..(1054): RXA02760
tagcatgggacgaaagctgttagatagcatgttgcatccctgcgttggctgattatcgctgggttttagggtcgatagataggttgggagaacacgcattatgagcgatgagaacattaacgagtttgagcaggacgaggatctgaacttcggcgcgagctttagtgatgaattcgcagatgacgatttcgatgcagaagcagacgtagaagcagatgctgctgcagaggcctctgccctggaagctgagcaggatctggaagaagagaccctagatgctccagaagaagccgcagaagaagctcctgctgctgcagagtccgaagctccagtagaagaggacgaagaggctgacagccttgctcaggcggctgctgcacttggtgacaccgatgagcaggacgcggatgcagagtacaaggctcgtctgcgtaagttcactcgtgagctgaagaagcagcctggtgtttggtacatcattcagtgctactccggctacgagaacaaggtgaaggcgaaccttgacatgcgtgctcagacccttgaggttgaggatgacatctttgaggttgttgttcctatcgagcaggtcactgagatccgtgatggtaagcgcaagctggttaagcgtaagttgctgccgggctacgttttggtccgcatggacatgaatgaccgcgtgtggtctgttgttcgcgatacacctggtgtgaccagctttgtgggtaacgagggcaatgcaactcctgtgaagcaccgcgatgttgcgaagttcttgatgcctcaggagcaggctgttgtcaccggtgaggctgctgctgcggctgccgagggtgagcaggttgtggctatgcctaccgataccaagaagcctcaggttgctgtggacttcactgttggtgaggctgtgaccattctgactggtgctttcgcttctgtttctgcaacgatttcttctatcgatcctgagctgcagaagctggaagttttggtgtccatctttggtcgtgaaactcctgttgatctcagcttcgaccaggttgagaaggttagctagtagctaaactgcaccactta

SEQ ID NO: 116 - protein, 318 aa, Corynebacterium glutamicum
MSDENINEFEQDEDLNFGASFSDEFADDDFDAEADVEADAAAEASALEAEQDLEEETLDAPEEAAEEAPAAAESEAPVEEDEEADSLAQAAAALGDTDEQDADAEYKARLRKFTRELKKQPGVWYIIQCYSGYENKVKANLDMRAQTLEVEDDIFEVVVPIEQVTEIRDGKRKLVKRKLLPGYVLVRMDMNDRVWSVVRDTPGVTSFVGNEGNATPVKHRDVAKFLMPQEQAVVTGEAAAAAAEGEQVVAMPTDTKKPQVAVDFTVGEAVTILTGAFASVSATISSIDPELQKLEVLVSIFGRETPVDLSFDQVEKVS

SEQ ID NO: 117 - DNA, 414 bp, Corynebacterium glutamicum
  CDS (101)..(391): RXA02306
atcgggctgggaatgttcatgatcttcgagggggttgtaggaatcggtggcagggtagtgggttagccccgcccccaggacgtcactagacttaggcactatgcaacctgaagaagtgcacatcaaggacgagaccatcaagttaggtcagttcatcaaattggccaaccttgtcgaatcaggcggagcggccaaagatgccatcgctaacggtgatgtcaccgtcaatggtgaagtggatacccgaaggggtaagacacttcgcgatggcgatgtggtgtgcatcggcgaggtatgcgcgcaggtgtctactggtgacgcagccgacgacgattattttgacgaagccaccgcaaacgatgacttcgatcccgaaaagtggaggaacatgtaatgccagcctttgaggcaatg

SEQ ID NO: 118 - protein, 97 aa, Corynebacterium glutamicum
MQPEEVHIKDETIKLGQFIKLANLVESGGAAKDAIANGDVTVNGEVDTRRGKTLRDGDVVCIGEVCAQVSTGDAADDDYFDEATANDDFDPEKWRNM

SEQ ID NO: 119 - DNA, 801 bp, Corynebacterium glutamicum
  CDS (101)..(778): RXA00130
gatcgtggttgcccctgatgaagaccccggccacgttgcgcagagaatcgtggaattcctgggtactataaactaatcccaattagcaggaaggattctcatgtcacagaaaattctcgtggttgatgatgatcccgccatctccgagatgctcaccatcgtgctcagcgcagaaggctttgacaccgtagctgtcaccgacggcgcactcgccgtggaaaccgcctcccgggaacaaccggatctgattttgctcgacttgatgcttccaggcatgaacggcatcgacatttgtcgcctcatccgccaagaatcctccgtacccatcatcatgctcaccgccaaaaccgacaccgttgatgtggtgctcggtttggaatccggtgcagacgattacgtgaacaagcctttcaaagcgaaagaacttgtcgcccgcatccgtgcccgcctccgcgcaaccgtggacgagcccagcgaaatcatcgaagtcggcgatctgtccatcgacgtcccagcacacaccgtcaaacgaaacggcgctgagatttccttgaccccactcgaattcgacctcctgctggaactcgcccgcaaaccacagcaagtattcacccgtgaagaattgctgggcaaagtgtggggctaccgccacgcatccgacactcgactggtcaacgttcacgttcagcgtctgcgcgccaagattgaaaaagatccagaaaatccgcagatcgtcctcaccgtccgcggtgttggctacaaaactggccacaacgattaagtttttcatttaaaaaaggg

SEQ ID NO: 120 - protein, 226 aa, Corynebacterium glutamicum
MSQKILVVDDDPAISEMLTIVLSAEGFDTVAVTDGALAVETASREQPDLILLDLMLPGMNGIDICRLIRQESSVPIIMLTAKTDTVDVVLGLESGADDYVNKPFKAKELVARIRARLRATVDEPSEIIEVGDLSIDVPAHTVKRNGAEISLTPLEFDLLLELARKPQQVFTREELLGKVWGYRHASDTRLVNVHVQRLRAKIEKDPENPQIVLTVRGVGYKTGHND

SEQ ID NO: 121 - DNA, 1149 bp, Corynebacterium glutamicum
  CDS (101)..(1126): RXA00885
caacctggcggtgaccgatgcgggacgtttgcttgccgacggcatcatcgccgacattttgcttagtgaagaagactaaatatttagtagggttacagacatggtgagtgcaacagagaaacgtagatacgaagtgttgcgggccatcgtcgctgattacattgcgtctcaggaacctgtcggatcgaagtcactcctcgagcgccataagctcaacgtgagttctgcgacgatccgcaacgatatgtcggtgctggaatccgatggctttatcgtccaggagcatgcaagttctggccgggtaccaaccgaaaggggttaccgcctttttgttgattccatccatgacatcaaaccgctgtcgctggcggaacggcgcgctattttgggcttccttgaagggggagtggacttagaggacgtgctgcgcagatctgtgcagctgttgtctcagctcacccatcaggctgccgtggtgcagctgcccaccctgaaaacagcgcgcgtgaagcactgcgaggtggtgccgctgtcgccgatgcgcttgctgctggtgctcattaccgatactggccgtgtagatcagcgcaacgtggaacttgaggaaccgctggcggcggaagaagttaatgtgctgcgcgatctgctcaacggcgcgctaggggagaaaacgctgacggctgcatcagatgcgctggaagagttggctcagcaagccccaaccgatattcgtgatgccatgcgccgctgctgcgatgtgctggtgaacacgcttgtcgatcaaccctctgaccgcctgatcctcgccggcacctcaaacctcacccgcttaagccgggaaacctccgcgagcctgcccatggttttagaagccttggaagagcaggtggtcatgttgaaactgctgtccaatgtcactgatcttgaccaagtgcgcgtgcatattggcggcgaaaatgaagacattgagctgcgcagcgcaacggtgattaccaccggttacggctcccagggcagcgcactgggcggattgggggtggttggccccacctatatggactactcgggaacaatttctaaggtgtccgccgttgctaagtatgttggtcgtgtgctcgctggcgaatagctgcgggtatagttggccat

SEQ ID NO: 122 - protein, 342 aa, Corynebacterium glutamicum
MVSATEKRRYEVLRAIVADYIASQEPVGSKSLLERHKLNVSSATIRNDMSVLESDGFIVQEHASSGRVPTERGYRLFVDSIHDIKPLSLAERRAILGFLEGGVDLEDVLRRSVQLLSQLTHQAAVVQLPTLKTARVKHCEVVPLSPMRLLLVLITDTGRVDQRNVELEEPLAAEEVNVLRDLLNGALGEKTLTAASDALEELAQQAPTDIRDAMRRCCDVLVNTLVDQPSDRLILAGTSNLTRLSRETSASLPMVLEALEEQVVMLKLLSNVTDLDQVRVHIGGENEDIELRSATVITTGYGSQGSALGGLGVVGPTYMDYSGTISKVSAVAKYVGRVLAGE

SEQ ID NO: 123 - DNA, 369 bp, Corynebacterium glutamicum
  CDS (101)..(346): RXA01418
aacactcaaatgatcatttgactattagcgaaagaaattatcaatggagcatcaacctcatctcctgaagctcgccgatgagtgggcgccaacattcaaaatgctcggcgatcgcacgcgcctccgcctcctcatcgcgctgcattatcacggccccggtgaagccaccgtctcagaactcgcggacatcgtcggcgtcaccctgcccacggcctccgcagcgctccaactgctcgcagataacggagtggtcgagtccttcaaggaggggcgggtgacaagatataagcttgtcgacgccacgacccacaccttgcttcaccacctcgggggcacccaccgacattaaagggaaccaaatagcgttcg

SEQ ID NO: 124 - protein, 82 aa, Corynebacterium glutamicum
MLGDRTRLRLLIALHYHGPGEATVSELADIVGVTLPTASAALQLLADNGVVESFKEGRVTRYKLVDATTHTLLHHLGGTHRH

SEQ ID NO: 125 - DNA, 885 bp, Corynebacterium glutamicum
  CDS (101)..(862): RXA01759
cactaaagaacttctgagcgcgctatcgttggtcgatgctattggtctgggtacttctccggtagaccatcactctgaataagggggataacatatagttatgaccaaacggctcagccttgaagggctccgctatgcgcaggccgtcgcagaaactcactcattcagcgcagcagcccgcgaatacggagtcacccaacctgcgctatccaacggcatcgccaaactggaagatcggctcggtgaacaactcttcgatcgatctactcaaggcgtcaccccgacgtcctttggcctccacatcctccccctgatccaacgcgcgctgactgaaatcgacgcaatcaccgcggaagcgcaccgtttgattaactcagaagcacgcagcattcgagttggaatctccccacttatcaaccctcaactggttgcacgaacatataccgcggttcgtgagcttcccacagcacacgacctagtactccgcgaagcaaacatgaaagaactacatgaaggacttcttgcaggtgaacttaatgtaattctcattcccgcagtgaaaccactaccccattttgaacaccgcatcattgactccgaaccagtcgttatcgtcgaatccacccaggacagcaccgaccccatagaacttcgcgagactcagcacgaaccgttcattctggtacccgacacatgcggtttaaccactttcaccaatcaactgtttgaaacaaatgacctggcattaaacgcctattccggcgaagcagccagctaccaagtactcgaacagtgggccacacttggactcggatctgcaatgcttccactttctaaactcagctcccctacagcaccccattgaccactccgcgaacaaggcct

SEQ ID NO: 126 - protein, 254 aa, Corynebacterium glutamicum
MTKRLSLEGLRYAQAVAETHSFSAAAREYGVTQPALSNGIAKLEDRLGEQLFDRSTQGVTPTSFGLHILPLIQRALTEIDAITAEAHRLINSEARSIRVGISPLINPQLVARTYTAVRELPTAHDLVLREANMKELHEGLLAGELNVILIPAVKPLPHFEHRIIDSEPVVIVESTQDSTDPIELRETQHEPFILVPDTCGLTTFTNQLFETNDLALNAYSGEAASYQVLEQWATLGLGSAMLPLSKLSSPTAPH

SEQ ID NO: 127 - DNA, 843 bp, Corynebacterium glutamicum
  CDS (101)..(820): RXN00363
tgaatttgatggtgtgagtcatggtgggtccttttgtgaaattcgatccaagcgggctttgagtaacatgttaccggttactgtggtgaattgtgcgataatgtcagacatgccaacaaaaagggttgcccccgcacgctcactcaccgaccaagtcatggatttcgtccgcgaatccacccttgataaaacaatggtcaccggagagtggtacagcgtttaccaggtcagcgaccaattaggcatttcccgctcccccgtcagagacgcgctgctccgcctggaagaagcagggctcatccgcttcaccaggaaccgcggattccaaattgtcgaaaccaaaccctctgatgtcgccgaaatttttgcccttcgtctaggcattgaacccgccgcagcataccgggcagcacagctacgcaccgaagaacagctccacgaagcagatgacatcattgcactcatggcgcaagccgaggccgacaatgacgaagaagcatttttcacccatgaccggcagtttcaccgacaaattatgaccatgggacactcccaacgcggggctgacctggtagaaaaactacgcgcacacacccgtatcctcggtgcttctactgccgggaacaaacgcacccttggcgatattttggaagaacacgaaccaatcttggatgccatcaaacgacaatcagcagaaatggcacgagccaccatgcgggagcatatccaagtcaccggaaagctactactagaacaagcagtggaaaaatccggcgaaggagctgctcagaagatttgggatcagtacacggcgggagtttaggcatatttacctaatcaatt

SEQ ID NO: 128 - protein, 240 aa, Corynebacterium glutamicum
MSDMPTKRVAPARSLTDQVMDFVRESTLDKTMVTGEWYSVYQVSDQLGISRSPVRDALLRLEEAGLIRFTRNRGFQIVETKPSDVAEIFALRLGIEPAAAYRAAQLRTEEQLHEADDIIALMAQAEADNDEEAFFTHDRQFHRQIMTMGHSQRGADLVEKLRAHTRILGASTAGNKRTLGDILEEHEPILDAIKRQSAEMARATMREHIQVTGKLLLEQAVEKSGEGAAQKIWDQYTAGV

SEQ ID NO: 129 - DNA, 707 bp, Corynebacterium glutamicum
  CDS (1)..(684): FRXA00363
cgctcactcaccgaccaagtcatggatttcgtccgcgaatccacccttgataaaacaatggtcaccggagagtggtacagcgtttaccaggtcagcgaccaattaggcatttcccgctcccccgtcagagacgcgctgctccgcctggaagaagcagggctcatccgcttcaccaggaaccgcggattccaaattgtcgaaaccaaaccctctgatgtcgccgaaatttttgcccttcgtctaggcattgaacccgccgcagcataccgggcagcacagctacgcaccgaagaacagctccacgaagcagatgacatcattgcactcatggcgcaagccgaggccgacaatgacgaagaagcatttttcacccatgaccggcagtttcaccgacaaattatgaccatgggacactcccaacgcggggctgacctggtagaaaaactacgcgcacacacccgtatcctcggtgcttctactgccgggaacaaacgcacccttggcgatattttggaagaacacgaaccaatcttggatgccatcaaacgacaatcagcagaaatggcacgagccaccatgcgggagcatatccaagtcaccggaaagctactactagaacaagcagtggaaaaatccggcgaaggagctgctcagaagatttgggatcagtacacggcgggagtttaggcatatttacctaatcaatt

SEQ ID NO: 130 - protein, 228 aa, Corynebacterium glutamicum
RSLTDQVMDFVRESTLDKTMVTGEWYSVYQVSDQLGISRSPVRDALLRLEEAGLIRFTRNRGFQIVETKPSDVAEIFALRLGIEPAAAYRAAQLRTEEQLHEADDIIALMAQAEADNDEEAFFTHDRQFHRQIMTMGHSQRGADLVEKLRAHTRILGASTAGNKRTLGDILEEHEPILDAIKRQSAEMARATMREHIQVTGKLLLEQAVEKSGEGAAQKIWDQYTAGV

SEQ ID NO: 131 - DNA, 843 bp, Corynebacterium glutamicum
  CDS (101)..(820): RXA00516
aagcaaaaaattgcttgtcgacgtctcccccaacctagcatccactttctgcaacccagtgtcacaaatagtctaaatttcggtgtactaaggtgttgtcatggtccaaaaagatgcccaggcctcccctgctacgagaaaagcagatcaggtatacacacagattcgtcgtgaaatcgaagatggaaccttaaatcctgggcaacgaatgtcggaagtgtggctggttgaacacaccggcgcttcgagaaccccagtccgggatgctctccgccggttagccgcagacgagttgatcattttggagccacgtcaggcgcctatggtgtcgccactttcgcttcgccacattaaggatctgtttgagttccgcaggatcgtcgaggtcgcagcgcttgaggaaatctctgttggagcgagtaaatcaccgcgtatctttggtgagttttctacgttggcggcagattttcgagagctggaaaactctgcagacgatgcagatttcaccgccgattttaggcgattgaccagtaagtttgatgatcttgttgcagcaaatactcacaaccaattccttggacgcagcatcttaagtttaaaaccgcacaccacgaggctgcggatcattgcgcattccgatcatgcgcgtctgcgccaatcggttcaggaacatattgaaatgtgtgaagctgtggcctcaggagatttaaggtcggcaggcgctgcgtgtagacagcacctgatccatgtagaaaagagcattttgaccgcattgattaatgctgattctacgggctcgcagggcattgatattaggtcttagaaccagcgtgcactgatggc

SEQ ID NO: 132 - protein, 240 aa, Corynebacterium glutamicum
MVQKDAQASPATRKADQVYTQIRREIEDGTLNPGQRMSEVWLVEHTGASRTPVRDALRRLAADELIILEPRQAPMVSPLSLRHIKDLFEFRRIVEVAALEEISVGASKSPRIFGEFSTLAADFRELENSADDADFTADFRRLTSKFDDLVAANTHNQFLGRSILSLKPHTTRLRIIAHSDHARLRQSVQEHIEMCEAVASGDLRSAGAACRQHLIHVEKSILTALINADSTGSQGIDIRS

SEQ ID NO: 133 - DNA, 774 bp, Corynebacterium glutamicum
  CDS (101)..(751): RXA01537
cctatagcacaatcccgcgtggggattaatggtcatcgaatatggtcagagcacccccgcaagtgcctaggtgtgtccccagtcctttaagatcagtcacatgacgcaggcaatagcagcatcccttgatttagcggctcgaatcaccgccaaaattgatcaaggagtgctcactccaggtactcgactacccgaggttgctttggcagaagaacttggcgtttcacggaacacgctgcgtgaagcttttcgggtactcatgcaagacggactggtggatcatattcccaaccgtggggttttcgtgcacacgttcaccaagtcggatgtggaagatatctatgcttaccgcacatttatcgaggttgctgcgattaggtcggcgcggaaaaatcctcagttgctggagcagtctttgggggtaatgcgagaggcctacgaaaggggtgctgcagccaatgccgtgggtgattggcaaactgtcggttctgccaacagtgcttttcacttggcgattgtggacctagcaggagtggctaggttgtcagcagacgctcgaaaagtgttggcgctggctcgcatcggattcatggccacctacaacgtggagacattccatagcatttacgtggaaaagaaccatcaaatcttgaagtatttggctgccggtgaattcgaagaggcggaacaatacctccagaaatacttcgaagattcgcgcgatgatttgtctgcgcacctaccggaattttgaaattgcgatagcatagatga

SEQ ID NO: 134 - protein, 217 aa, Corynebacterium glutamicum
MTQAIAASLDLAARITAKIDQGVLTPGTRLPEVALAEELGVSRNTLREAFRVLMQDGLVDHIPNRGVFVHTFTKSDVEDIYAYRTFIEVAAIRSARKNPQLLEQSLGVMREAYERGAAANAVGDWQTVGSANSAFHLAIVDLAGVARLSADARKVLALARIGFMATYNVETFHSIYVEKNHQILKYLAAGEFEEAEQYLQKYFEDSRDDLSAHLPEF

SEQ ID NO: 135 - DNA, 819 bp, Corynebacterium glutamicum
  CDS (101)..(796): RXA02494
cagagtccaaggaaccggcaggatctaagcagggacctagtttggattcacctattcgtacgactgcgtccaaagcatctgggcgccgaaaggaaaaatcatgacgagaatcctgatcgttgaagatgaggaatcgttagcagatcctttggcctttcttcttcgcaaagaaggttttgacaccatcatcgccggtgatggcccaaccgcacttgtggagttcagtcgcaacgaaatcgacatcgtcctcttagacctcatgctcccaggcatgtctggcaccgacgtatgcaaagaactccgcagcgtatccactgttcccgtcatcatggtcaccgcccgcgactccgagatcgacaaagttgttggcctcgaactcggcgccgatgattatgtaaccaagccatattcttcccgcgaactcatcgcccgcatccgcgctgtcctgcgccgacgcggagttactgaaaccgaagccgaagaattaccacttgacgatcaaatcctcgaaggcggccgcgtccgcatggacgtcgattcccacaccgtcaccgtcggtggcgaaccagtgagcatgccactgaaggaattcgaccttctggagtacctcctccgaaacgccggccgagtcctcacccgcggacagctcatcgaccgaatttggggcgcagattacgtcggcgacaccaaaaccctcgacgttcatgtcaaaaggttgcgttccaagatcgaagaagagccatctcgccctcgttacctcgtgaccgtgcgtggattgggctacaaattcgagctgtagggctctgttaggccctgttg

SEQ ID NO: 136 - protein, 232 aa, Corynebacterium glutamicum
MTRILIVEDEESLADPLAFLLRKEGFDTIIAGDGPTALVEFSRNEIDIVLLDLMLPGMSGTDVCKELRSVSTVPVIMVTARDSEIDKVVGLELGADDYVTKPYSSRELIARIRAVLRRRGVTETEAEELPLDDQILEGGRVRMDVDSHTVTVGGEPVSMPLKEFDLLEYLLRNAGRVLTRGQLIDRIWGADYVGDTKTLDVHVKRLRSKIEEEPSRPRYLVTVRGLGYKFEL

SEQ ID NO: 137 - DNA, 660 bp, Corynebacterium glutamicum
  CDS (101)..(637): RXA00029
tcctcgcccgcacccacggtggagcgaaacgtgtgcccaaacgcggtactccccaaccgtttgccgtgcgccaggtgaggaccgagaggccaaacgcattttggcccaggccaccgcccaactaatcgctgatgatgaagcagtaattttcgacaacggcaccacctgccaggcagtggcccaagagttggcggggcgtcccatcacggcattgtgtctgtctctacattcggcggtcgccctgggaagccgagctggcaccaacgttttcatccccggcggccccgtggaaaacgactcactcgccttatctggcccggctgtgatcaccgcgttacgagatttctccgccgatgtcgtgatcctcggttcctgctctacatcactggagcacgggttggccaccactacctacgacgatgcggaaaacaagcgcgcagccatccatgctgccacccgacgaatccttgtggtgtccgcccgtaaactcaaccacgtttccactttccgtttcgcagacgtcgcggacttacaccagctggtcacaacctccgatgcgccacgggagattctcgccgagatccgggatctcggcgtgcaggttattactgttcccgcccctgacgagcaacgaagttaactcttcatggttgctgagca

SEQ ID NO: 138 - protein, 179 aa, Corynebacterium glutamicum
LAQATAQLIADDEAVIFDNGTTCQAVAQELAGRPITALCLSLHSAVALGSRAGTNVFIPGGPVENDSLALSGPAVITALRDFSADVVILGSCSTSLEHGLATTTYDDAENKRAAIHAATRRILVVSARKLNHVSTFRFADVADLHQLVTTSDAPREILAEIRDLGVQVITVPAPDEQRS

SEQ ID NO: 139 - DNA, 762 bp, Corynebacterium glutamicum
  CDS (101)..(739): RXA00655
ttgcctgtggattaaaactatacgaaccggtttgtctatattggtgttagacagttcgtcgtatcttgaaacagaccaacccgaaaggacgtggccgaacgtggctgctagcgcttcaggcaagagtaaaacaagtgccggggcaaaccgtcgtcgcaatcgaccaagcccccgacagcgtctcctcgatagcgcaaccaaccttttcaccacagaaggtattcgcgtcatcggtattgatcgtatcctccgtgaagctgacgtggcgaaggcgagcctctattcccttttcggatcgaaggacgccttggttattgcatacctggagaacctcgatcagctgtggcgtgaagcgtggcgtgagcgcaccgtcggtatgaaggatccggaagataaaatcatcgcgttctttgatcagtgcattgaggaagaaccagaaaaagatttccgcggctcgcactttcagaatgcggctagtgagtaccctcgccccgaaactgatagcgaaaagggcattgttgcagcagtgttagagcaccgcgagtggtgtcataagactctgactgatttgctcactgagaagaacggctacccaggcaccacccaggcgaatcagctgttggtgttccttgatggtggacttgctggatctcgattggtccacaacatcagtcctcttgagacggctcgcgatttggctcggcagttgttgtcggctccacctgcggactactcaatttagtttcttcattttccgaaggg

SEQ ID NO: 140 - protein, 213 aa, Corynebacterium glutamicum
VAASASGKSKTSAGANRRRNRPSPRQRLLDSATNLFTTEGIRVIGIDRILREADVAKASLYSLFGSKDALVIAYLENLDQLWREAWRERTVGMKDPEDKIIAFFDQCIEEEPEKDFRGSHFQNAASEYPRPETDSEKGIVAAVLEHREWCHKTLTDLLTEKNGYPGTTQANQLLVFLDGGLAGSRLVHNISPLETARDLARQLLSAPPADYSI

SEQ ID NO: 141 - DNA, 2538 bp, Corynebacterium glutamicum
  CDS (101)..(2515): RXN03136
cttatcgacgagctccaaggctggaccgtggtacgtgccacttccctgtcgtggctgaaataaaaatccccgaaacctccttggacacatcgcccacaaattgggtgcgcactccgccaactccatccgtggtgtgatcgaccgtctcgatgcctccaccgtggtgatcgttgccgatgtccactgggccgacgtggaatccatgcaaaaactcatcgaatattccatgcgcatggtttctggccgtttcgcactcatcatgattggccttgatgaagagaacttagtgttccacgatgaggtggtctcgctcccctccatcgcagactccacctacgtattgccgccgatgagtattgaagaaatccgccagcttgcgcttaccgatgtccgcggccgcatcagcaccaccaccgccacagacatccagcgcatcaccggcggcatctacgggcgagtcaaagaagtcctccactcggaatcccccgatcactggcgaatgcccaacccaaatattcccatcccacaaagctggcatgccaacctgttgagacgcatcaccaacgaagaagtctggcatgtactactcgccgtcgctgtccttccctccggaggccccattgacctggtaaaactcataggcaacgaccccacgggcatgctttgcgacgacgccgtccgctcaggcctgctccgcgtgctgccgtctgacggccaaccacaagtggatttggtcctgccgatcgaccgcgccgtactgcaatcacgcactccgctcaacattctggcgcagttgcaccacaaggcagccgaatattacggcaagtggaatcaaaaagatgcccaactggagcacgaagcatttgctgcaattgatccaaatgatccagcagtgcgagccctagcgcagcgcggatatgcgttgggtaggactggccactggatggaatcggcacacgccctatctcttgccgcgaaccgcactgcacaccaagaagaatcaaataagtacttgctggagtccatcgattcactgatcgccgccgccgatctcccccaagctcgatccagagcatccacccttgatcttggagaaaccggcattcaacaagactcaatgctgggctacctggcaatccacgaaggccggcgcctcgaagcacgcaatctccttcatcgtgcttctgaagaattgctggcgcagcacccgattgatccgatccacggcccccgcatggctcagcgcaaagtactgttaaacttagtggactggaatccagaagaactcctggtgtgggctgatagagcagtcgcatggactgaagaggatgctggcgaaaaggttgaggcccaagctatttccctcattggacaatccatcctcgatggctgcctccccgaagataaacccatccccggtgaaaccacccttcacgcacaacgccgccacatggcaatgggctggctttccatggttcacgatgatccagtaactgcacgtcaaaagcttgaacgtcgcacatccatcaatggttcagaacgcatcagtttgtggcaagacggatggctggctcggtccctactgctgctcggcgaatgggagtccgcagcacgcaccgtagaaatcggtctggcccgcgccgaacagtttggcatccgcttcctcgaaccactgttactgtggtcgggcgccacaattgcaacagcccgcggaaactctgacttggcacgaaattacatgagcagactgtccaccgatcaagactccttcatcgtccaatctatgccatctgcgatgtgtcgcatgtgggtccaccgccatagaaatgaaatccccggtgcgatcgtggccggagaacaattggaaaaaatcgccgcacacaaacacgtcaacgcacctggattctggccatggcaagacgtccacgcaacgcatctcatccgcatcggcgaaactgagcgcgcccaggagttagtgaactccacgcttgaggagctcagaggctccgatatcatgtctgcccacgcaaaaattgccgttcccgacgccatgttgatgatccaccacggagatgtgaaaaagggatttaagcgtttcgacgacgccctcgatatgatcgatcccctcaccctcccctactatcgggcacgcatctgctttgaatacggccaggccctgagacgccaggggcaacgtcgacgtgctgatgaacaatttgcccgtgcagcttccctattccaagacatgggcgccgacgcgatggtcaccctagccaaccgagaacgccgggtgggtggccttggtcaacgatccgagcaagccggtgggctcacccctcaggaatatgaaattgcccgattagtgtcatctgggcatgccaaccgagaggtcgcacaggagcttttcctctcgcctaagaccgtggaataccatctcacccgggtgtacaaaaagctcggaatacgcaatcggatggaacttgccgaggctttgaagaagtactcacacgacgcctagcagcggatatgtttgcggac

SEQ ID NO: 142 - protein, 805 aa, Corynebacterium glutamicum
LGAHSANSIRGVIDRLDASTVVIVADVHWADVESMQKLIEYSMRMVSGRFALIMIGLDEENLVFHDEVVSLPSIADSTYVLPPMSIEEIRQLALTDVRGRISTTTATDIQRITGGIYGRVKEVLHSESPDHWRMPNPNIPIPQSWHANLLRRITNEEVWHVLLAVAVLPSGGPIDLVKLIGNDPTGMLCDDAVRSGLLRVLPSDGQPQVDLVLPIDRAVLQSRTPLNILAQLHHKAAEYYGKWNQKDAQLEHEAFAAIDPNDPAVRALAQRGYALGRTGHWMESAHALSLAANRTAHQEESNKYLLESIDSLIAAADLPQARSRASTLDLGETGIQQDSMLGYLAIHEGRRLEARNLLHRASEELLAQHPIDPIHGPRMAQRKVLLNLVDWNPEELLVWADRAVAWTEEDAGEKVEAQAISLIGQSILDGCLPEDKPIPGETTLHAQRRHMAMGWLSMVHDDPVTARQKLERRTSINGSERISLWQDGWLARSLLLLGEWESAARTVEIGLARAEQFGIRFLEPLLLWSGATIATARGNSDLARNYMSRLSTDQDSFIVQSMPSAMCRMWVHRHRNEIPGAIVAGEQLEKIAAHKHVNAPGFWPWQDVHATHLIRIGETERAQELVNSTLEELRGSDIMSAHAKIAVPDAMLMIHHGDVKKGFKRFDDALDMIDPLTLPYYRARICFEYGQALRRQGQRRRADEQFARAASLFQDMGADAMVTLANRERRVGGLGQRSEQAGGLTPQEYEIARLVSSGHANREVAQELFLSPKTVEYHLTRVYKKLGIRNRMELAEALKKYSHDA

SEQ ID NO: 143 - DNA, 2431 bp, Corynebacterium glutamicum
  CDS (101)..(2431): FRXA00645
cttatcgacgagctccaaggctggaccgtggtacgtgccacttccctgtcgtggctgaaataaaaatccccgaaacctccttggacacatcgcccacaaattgggtgcgcactccgccaactccatccgtggtgtgatcgaccgtctcgatgcctccaccgtggtgatcgttgccgatgtccactgggccgacgtggaatccatgcaaaaactcatcgaatattccatgcgcatggtttctggccgtttcgcactcatcatgattggccttgatgaagagaacttagtgttccacgatgaggtggtctcgctcccctccatcgcagactccacctacgtattgccgccgatgagtattgaagaaatccgccagcttgcgcttaccgatgtccgcggccgcatcagcaccaccaccgccacagacatccagcgcatcaccggcggcatctacgggcgagtcaaagaagtcctccactcggaatcccccgatcactggcgaatgcccaacccaaatattcccatcccacaaagctggcatgccaacctgttgagacgcatcaccaacgaagaagtctggcatgtactactcgccgtcgctgtccttccctccggaggccccattgacctggtaaaactcataggcaacgaccccacgggcatgctttgcgacgacgccgtccgctcaggcctgctccgcgtgctgccgtctgacggccaaccacaagtggatttggtcctgccgatcgaccgcgccgtactgcaatcacgcactccgctcaacattctggcgcagttgcaccacaaggcagccgaatattacggcaagtggaatcaaaaagatgcccaactggagcacgaagcatttgctgcaattgatccaaatgatccagcagtgcgagccctagcgcagcgcggatatgcgttgggtaggactggccactggatggaatcggcacacgccctatctcttgccgcgaaccgcactgcacaccaagaagaatcaaataagtacttgctggagtccatcgattcactgatcgccgccgccgatctcccccaagctcgatccagagcatccacccttgatcttggagaaaccggcattcaacaagactcaatgctgggctacctggcaatccacgaaggccggcgcctcgaagcacgcaatctccttcatcgtgcttctgaagaattgctggcgcagcacccgattgatccgatccacggcccccgcatggctcagcgcaaagtactgttaaacttagtggactggaatccagaagaactcctggtgtgggctgatagagcagtcgcatggactgaagaggatgctggcgaaaaggttgaggcccaagctatttccctcattggacaatccatcctcgatggctgcctccccgaagataaacccatccccggtgaaaccacccttcacgcacaacgccgccacatggcaatgggctggctttccatggttcacgatgatccagtaactgcacgtcaaaagcttgaacgtcgcacatccatcaatggttcagaacgcatcagtttgtggcaagacggatggctggctcggtccctactgctgctcggcgaatgggagtccgcagcacgcaccgtagaaatcggtctggcccgcgccgaacagtttggcatccgcttcctcgaaccactgttactgtggtcgggcgccacaattgcaacagcccgcggaaactctgacttggcacgaaattacatgagcagactgtccaccgatcaagactccttcatcgtccaatctatgccatctgcgatgtgtcgcatgtgggtccaccgccatagaaatgaaatccccggtgcgatcgtggccggagaacaattggaaaaaatcgccgcacacaaacacgtcaacgcacctggattctggccatggcaagacgtccacgcaacgcatctcatccgcatcggcgaaactgagcgcgcccaggagttagtgaactccacgcttgaggagctcagaggctccgatatcatgtctgcccacgcaaaaattgccgttcccgacgccatgttgatgatccaccacggagatgtgaaaaagggatttaagcgtttcgacgacgccctcgatatgatcgatcccctcaccctcccctactatcgggcacgcatctgctttgaatacggccaggccctgagacgccaggggcaacgtcgacgtgctgatgaacaatttgcccgtgcagcttccctattccaagacatgggcgccgacgcgatggtcaccctagccaaccgagaacgccgggtgggtggccttggtcaacgatccgagcaagccggtgggctcacccctcaggaatatgaaattgcccgattagtgtcatctgggcatgccaaccgagaggtcgcacaggagcttttcctctcgcctaagaccgtggaatac

SEQ ID NO: 144 - protein, 777 aa, Corynebacterium glutamicum
LGAHSANSIRGVIDRLDASTVVIVADVHWADVESMQKLIEYSMRMVSGRFALIMIGLDEENLVFHDEVVSLPSIADSTYVLPPMSIEEIRQLALTDVRGRISTTTATDIQRITGGIYGRVKEVLHSESPDHWRMPNPNIPIPQSWHANLLRRITNEEVWHVLLAVAVLPSGGPIDLVKLIGNDPTGMLCDDAVRSGLLRVLPSDGQPQVDLVLPIDRAVLQSRTPLNILAQLHHKAAEYYGKWNQKDAQLEHEAFAAIDPNDPAVRALAQRGYALGRTGHWMESAHALSLAANRTAHQEESNKYLLESIDSLIAAADLPQARSRASTLDLGETGIQQDSMLGYLAIHEGRRLEARNLLHRASEELLAQHPIDPIHGPRMAQRKVLLNLVDWNPEELLVWADRAVAWTEEDAGEKVEAQAISLIGQSILDGCLPEDKPIPGETTLHAQRRHMAMGWLSMVHDDPVTARQKLERRTSINGSERISLWQDGWLARSLLLLGEWESAARTVEIGLARAEQFGIRFLEPLLLWSGATIATARGNSDLARNYMSRLSTDQDSFIVQSMPSAMCRMWVHRHRNEIPGAIVAGEQLEKIAAHKHVNAPGFWPWQDVHATHLIRIGETERAQELVNSTLEELRGSDIMSAHAKIAVPDAMLMIHHGDVKKGFKRFDDALDMIDPLTLPYYRARICFEYGQALRRQGQRRRADEQFARAASLFQDMGADAMVTLANRERRVGGLGQRSEQAGGLTPQEYEIARLVSSGHANREVAQELFLSPKTVEY

SEQ ID NO: 145 - DNA, 471 bp, Corynebacterium glutamicum
  CDS (101)..(448): RXA00593
ttggtgtgatgcattcgacagcaaattggctgtgtgactacacttgcgagtgtattaagtattaggccgtgcatatgtagcgcattttaaggagattgtcatgacgtctgtgattccagagcagcgcaacaaccccttttatagggacagcgccacaattgcttcctcggaccacacagagcgtggtgagtgggtcactcaggcaaagtgtcgaaatggcgacccagatgcattgtttgttcgtggtgcagcgcaacgccgagcagcagcaatttgccgccactgccctgtagccatgcagtgctgcgccgatgccttagataacaaggtggaattcggagtctggggaggcctgaccgagcgccagcgccgtgcattgcttcgaaagaagccgcacattactaactgggctgaatatttggctcaggggggcgagatcgccggggtttaattaatttcaagggctggcca

SEQ ID NO: 146 - protein, 116 aa, Corynebacterium glutamicum
MTSVIPEQRNNPFYRDSATIASSDHTERGEWVTQAKCRNGDPDALFVRGAAQRRAAAICRHCPVAMQCCADALDNKVEFGVWGGLTERQRRALLRKKPHITNWAEYLAQGGEIAGV

SEQ ID NO: 147 - DNA, 967 bp, Corynebacterium glutamicum
  CDS (101)..(967): RXA02724
cgagcgcgcacgcggtggccaccgccaagctcattgcggatccggactccgatttcatggctgatctggaggaagcgcggcgcgtggataatatgggtgcatgctgatcggtgaggtgtccaagctcagtggggtgagtgcgcgcatgttgcggcactacgaaaagctgggtttggtcgagccgaagcagtcgacggcggggtatcgggaatactcagaaggcgatgtgcgcaggattttccatatcgaaggtttgcgcagcttgggtcttagtttgaagcaggttggagacgcgcttgaggatccagactttgatcctcaggcagtcatttccgagatgattgctgagacttctgcgcggatttctatggaacgggagttgcttgccaggctgaaagcggtgcgtcatgcgcaggcctcggattgggaatcggcgttggatgcggtgcagattttacgtcgcctgcgatcgggggatccggcgcaacgtcaagccgtggcctatgactctgtctctggtaaagaagcagttgcgctagaaaccttggtggaatcggcgctcggtgagtcgcatttgaacgcggagggggcgctgtcgtgggcggttgtgcagcgtggtgaggaagctgttgcattggcggcacgaggtttgcgctcaagggatgcggcggtgcggctgcgggctgtaaggattgtggcgagcgcgccgagtgctgttgcggatcgagtagagtggctacggccaatgattcgcgatcccgatgctctcgtgcgtgctgaaactgcgttggcgttgggaaaatcaggcgatgagagtgcagttgagcagctcgtgtccatggttctcaccggtcttcgggacgtggaggcagccgaattgcttgccggatttggggagcccgtgcagttagatgtgttcaagaaatttgcgcggacgctggatgatgaggaaacaatgtccccgacg

SEQ ID NO: 148 - protein, 289 aa, Corynebacterium glutamicum
MLIGEVSKLSGVSARMLRHYEKLGLVEPKQSTAGYREYSEGDVRRIFHIEGLRSLGLSLKQVGDALEDPDFDPQAVISEMIAETSARISMERELLARLKAVRHAQASDWESALDAVQILRRLRSGDPAQRQAVAYDSVSGKEAVALETLVESALGESHLNAEGALSWAVVQRGEEAVALAARGLRSRDAAVRLRAVRIVASAPSAVADRVEWLRPMIRDPDALVRAETALALGKSGDESAVEQLVSMVLTGLRDVEAAELLAGFGEPVQLDVFKKFARTLDDEETMSPT

SEQ ID NO: 149 - DNA, 420 bp, Corynebacterium glutamicum
  CDS (101)..(397): RXA00494
ttcatcattgcggtcgacactgttgtctcgggcgaacaccccacatcagagaacgcgatcaaagctataaaaagtagctgacaatagggagtatttgaagatgacattgcctcaccagcttcccgggccaaatgcagacttctgggactggcagttgcacggaacgtgccgcggcgagacctccgacgtgttctatcacccggacggcgagcgcggtcgtgctcgccagcgtcgggagctgcgcgcaaaggccatctgtgcagcatgcccagtattggaatcctgccgcaagcatgcactagctgtagcagagccttatggagtatggggcggactttcagagtccgaacgactggttatccttcgcaacaacgagcgcaagcaaccagtagcagtttaaaagagcagacccggtcacca

SEQ ID NO: 150 - protein, 99 aa, Corynebacterium glutamicum
MTLPHQLPGPNADFWDWQLHGTCRGETSDVFYHPDGERGRARQRRELRAKAICAACPVLESCRKHALAVAEPYGVWGGLSESERLVILRNNERKQPVAV

SEQ ID NO: 151 - DNA, 435 bp, Corynebacterium glutamicum
  CDS (101)..(412): RXN01368
tcgcttgggagaaggaaaaattttccaaacctgctcggggaccaacatccccgatgagaacagacttaaagtagctttgaaagtgagaggggggcgagtaatggaagattcagctggggacgtatctgcaaagttgaaagcaggccagactcgcaccgcactggagatgactttggatgatctgttcggagcggttgagcaagaatggcaggagcaggcgctgtgtgcgcaaactgatcctgaagcattctttccagaaaaaggtggctcaactcgcgaagccaagcggatctgccagggctgcccggttcgggatgaatgcctagagtttgctcttgagcatgatgaacgctttggaatttggggtggtctctctgaacgtgagcgccgccgcctgaaacgcgaaatttcgtaaaacttcaagaccagtaagcg

SEQ ID NO: 152 - protein, 104 aa, Corynebacterium glutamicum
MEDSAGDVSAKLKAGQTRTALEMTLDDLFGAVEQEWQEQALCAQTDPEAFFPEKGGSTREAKRICQGCPVRDECLEFALEHDERFGIWGGLSERERRRLKREIS

SEQ ID NO: 153 - DNA, 152 bp, Corynebacterium glutamicum
  CDS (1)..(129): FRXA01368
aagcggatctgccagggctgcccggttcgggatgaatgcctagagtttgctcttgagcatgatgaacgctttggaatttggggtggtctctctgaacgtgagcgccgccgcctgaaacgcgaaatttcgtaaaacttcaagaccagtaagcg

SEQ ID NO: 154 - protein, 43 aa, Corynebacterium glutamicum
KRICQGCPVRDECLEFALEHDERFGIWGGLSERERRRLKREIS

SEQ ID NO: 155 - DNA, 897 bp, Corynebacterium glutamicum
  CDS (101)..(874): RXN00464
gaataaaccaaagggtggacacttattcgaacgggtgcttgatttaggcaacttgagcaaaattctgccatttcgcctcaaatcgggctagttttgaagcatgagcgaacgtcagctggaaaagtcaattgagcacgccgtcgagttagcccgcgaagcccgaaacatcgaagtttttaccggagccggaatgagcgccgactccgggttggaaacgtatcgtgatgataaaaccgggctgtggagcaacgtagatccacaagcgatggcaagtatcgatgcatggcgcaaagatccagagccaatgtgggcgtggtatcgctggcgcgccggggtggcagctagggcagaacccaacgcggggcatcaagctatttcctactgggaggggagtgacaccgtcgaacacgttcacatcaccacccagaacattgacaacctgcacgagcgagctggctctagcgatgtgacacatcttcatggcagcttgtttgaatacaggtgctctgattgtgcgactccatgggaagacgataaaaactatccgcaagaacccattgcacgccttgctcctccacaatgtgaaaagtgcggagggctgattagaccaggtgtggtgtggtttggtgagaacctgcccgtagaagagtgggatattgcagagcaacgcatcgcagaagccgatctcatgatcattgtgggtacctccgggattgttcatcctgcagcagcactcccgcaattagcccaacaacgcggcgttcccatcgtggagatctccccaacgcgcaccgaacttagccggatcgcagacttcacctggatgtccaccgcagcccaagcgctaccagcgttgatgcgaggtttgagcgcctaacatgactgaagatgacttag

SEQ ID NO: 156 - protein, 258 aa, Corynebacterium glutamicum
MSERQLEKSIEHAVELAREARNIEVFTGAGMSADSGLETYRDDKTGLWSNVDPQAMASIDAWRKDPEPMWAWYRWRAGVAARAEPNAGHQAISYWEGSDTVEHVHITTQNIDNLHERAGSSDVTHLHGSLFEYRCSDCATPWEDDKNYPQEPIARLAPPQCEKCGGLIRPGVVWFGENLPVEEWDIAEQRIAEADLMIIVGTSGIVHPAAALPQLAQQRGVPIVEISPTRTELSRIADFTWMSTAAQALPALMRGLSA

SEQ ID NO: 157 - DNA, 355 bp, Corynebacterium glutamicum
  CDS (75)..(332): FRXA00464
atccgcaagaacccattgcacgccttgctcctccacaatgtgaaaagtgcggagggctgattagaccaggtgtggtgtggtttggtgagaacctgcccgtagaagagtgggatattgcagagcaacgcatcgcagaagccgatctcatgatcattgtgggtacctccgggattgttcatcctgcagcagcactcccgcaattagcccaacaacgcggcgttcccatcgtggagatctccccaacgcgcaccgaacttagccggatcgcagacttcacctggatgtccaccgcagcccaagcgctaccagcgttgatgcgaggtttgagcgcctaacatgactgaagatgacttag

SEQ ID NO: 158 - protein, 86 aa, Corynebacterium glutamicum
VWFGENLPVEEWDIAEQRIAEADLMIIVGTSGIVHPAAALPQLAQQRGVPIVEISPTRTELSRIADFTWMSTAAQALPALMRGLSA

SEQ ID NO: 159 - DNA, 1482 bp, Corynebacterium glutamicum
  CDS (101)..(1459): RXA01655
gtttcggtcatgacagatgatccaacgccacaaagtggactagcggtagatccactttcagtcacttgcattagaccacttttttgaggacgatgaagccatgcttgccgaccttcccatcgccttaaacccacacgaaccaacatccatccccacgcagctcacagaacagatccgtcgtctcgtggcgaggggaattctcaccccaggagacccgcttcccagcagtcgctcactatccacccaattgggggtatcccgcggcagtgtggtgaccgcttatgaccaattggccggtgaaggctacctcagcaccgcccgcggttccggtacaacgatcaacccagatctgcatttgttgaagcctgtggaaattgagaagaaggagacgtcgagaagcgtcccgcccccgctgctcaacctgagccccggcgtgcccgataccgcgacgctcgccgattccgcatggcgcgctgcgtggcgcgaagcctgcgccaagccacccacgcactcccctgagcagggacttttgaggctgcggatcgagatcgccgaccacctgcgccagatgcgtggcctcatggtcgagccggagcagatcatcgtcaccgccggcgcgcgcgaggggctgagtctgctgctgcgcaccatggatgcgcctgcccgcatcggcgtcgaatcgcccggctaccccagcctgcgccgcatcccgcaggtgcttggccatgagacgatcgatgtgccgaccgacgaatccggcctcgtaccccgcgcgctgccccacgaccttaacgcgctactggtaacccctagccatcaatatccctacggcggctcgctgcccgccgatcgccgcaccgcgctagtcgcgtgggctgaggcaaacgatgcgttgcttattgaagacgacttcgattctgagctgcgctacgtcggtatgccgcttccgccgctgcgtgcgctggcgcccgatcgcacgattctgctcggcacgttttcctccgtgatcacaccacaagtcgcctgcggatacctcatcgcgccgacgccccaggcgcgcgtgctcgccacgcttcgcgggattctcggccagccagtcggcgccatcacccaacacgcgctcgcgtcctacctcgcctcaggcgctttacgacgccgcacccaacgtttgcggcgcctttaccgacaccgccgctccatcgtccaagacaccctcggtgacctcccgaatacgcagcttcgccccatcaacggtggcctccacgcagttctcctttgcgacaaaccccaagacctcgttgtcaccacactcgcctcccgaggccttaacgtcaccgcgctttcccactactggggcggcaccggcgcagacaacggcatcgtcttcggcttcggctcccacgacgaagacaccctcagatgggtgcttgctgagatcagcgatgcggtgtctctaggctaaagaaaaaacagcccgagagg

SEQ ID NO: 160 - protein, 453 aa, Corynebacterium glutamicum
MLADLPIALNPHEPTSIPTQLTEQIRRLVARGILTPGDPLPSSRSLSTQLGVSRGSVVTAYDQLAGEGYLSTARGSGTTINPDLHLLKPVEIEKKETSRSVPPPLLNLSPGVPDTATLADSAWRAAWREACAKPPTHSPEQGLLRLRIEIADHLRQMRGLMVEPEQIIVTAGAREGLSLLLRTMDAPARIGVESPGYPSLRRIPQVLGHETIDVPTDESGLVPRALPHDLNALLVTPSHQYPYGGSLPADRRTALVAWAEANDALLIEDDFDSELRYVGMPLPPLRALAPDRTILLGTFSSVITPQVACGYLIAPTPQARVLATLRGILGQPVGAITQHALASYLASGALRRRTQRLRRLYRHRRSIVQDTLGDLPNTQLRPINGGLHAVLLCDKPQDLVVTTLASRGLNVTALSHYWGGTGADNGIVFGFGSHDEDTLRWVLAEISDAVSLG

SEQ ID NO: 161 - DNA, 786 bp, Corynebacterium glutamicum
  CDS (101)..(763): RXA00126
cagaagtagtataagaagtgaagttgatcgcgtcatcgtagtacgagtaattccactcacacatcaatgcggtgaccacaattgggaggagaagtagcacgtgactacacctgctgagaacaacacccttagccccgagaccaaagtaagcatcactggtcgaaacgttgaggttcctgatcactttgcagaacgagtaaataccaaactcgcaaagattgagcgcctcgacccaacgctgaccttcttccacgttgagctacagcacgagccaaacccacgtcgtgctgacgaaagtgatcgcattcagatcaccgccaccggcaagggacacatcgcccgagcagaagcaaaggaagacagcttctacgcggcactggaaactgcactagccaagatggagcgctccctgcgcaaagtgaaggcacgtcgcagcatttcccgctccggtcaccgcgcaccactaggcactggtgaggtcggtgcacagttggtagccgagtcccaagaggcacgcggtgccgatgaactgggcaaatacgatgttgatccttatgcagataaggtcgatgacgtcatgccaggccaggttgttcgtaccaaggaacacccagcaaccccaatgagtgtggatgacgcactatccgagatggaattggttggacacgatttctacctcttcgtcaacgaagagaccaaccagccatcggtggtgtaccgccgacacgcattcgactatggattaatttccctgtccgatgcatagcaattagttgctaagtaccc

SEQ ID NO: 162 - protein, 221 aa, Corynebacterium glutamicum
VTTPAENNTLSPETKVSITGRNVEVPDHFAERVNTKLAKIERLDPTLTFFHVELQHEPNPRRADESDRIQITATGKGHIARAEAKEDSFYAALETALAKMERSLRKVKARRSISRSGHRAPLGTGEVGAQLVAESQEARGADELGKYDVDPYADKVDDVMPGQVVRTKEHPATPMSVDDALSEMELVGHDFYLFVNEETNQPSVVYRRHAFDYGLISLSDA

SEQ ID NO: 163 - DNA, 678 bp, Corynebacterium glutamicum
  CDS (101)..(655): RXN02450
ccagaccgatctccatcaattcacaggcgaagcgaaccgaaaacgattgcgttgttctacactgatcagagcccgtccctcaacaagaagagcaacaccaatgaatctgaaagatctcaaggccgcagagacccgtcaaaggtttatcgatgtagcccacgaactcttcttggagcacggttatggttccacctccatgaatcagattgctcaggcagcgggtggtagccgggcaaacctttaccttcatttccgtaacaagcccgatctcatgatggctaaaatgcgggaacttgaacccgcggtccgcacccctgtcctaaaagtttttgatctccctgaacacactttggagtccattcttagatggctggactccatgacggaggtgtggaaagcgaatgccaaagtgttcggggcgatggaacaagcgatggtcgaagatgctgcggtggccgatgagtggctttcaatgatgcagaggttgagccaatcggtgcccgaattggttgagaatgaagagcgtcgagttcagttcctggctagcttgatgggcatggatagaaacttttacttcctctatgtccgagggcaagatgttgatgaggaattgctaaagttggctgtggctcgccaatggttggcagttttccaataggcaatgcgccccaatcccct

SEQ ID NO: 164 - protein, 185 aa, Corynebacterium glutamicum
MNLKDLKAAETRQRFIDVAHELFLEHGYGSTSMNQIAQAAGGSRANLYLHFRNKPDLMMAKMRELEPAVRTPVLKVFDLPEHTLESILRWLDSMTEVWKANAKVFGAMEQAMVEDAAVADEWLSMMQRLSQSVPELVENEERRVQFLASLMGMDRNFYFLYVRGQDVDEELLKLAVARQWLAVFQ

SEQ ID NO: 165 - DNA, 678 bp, Corynebacterium glutamicum; identical to SEQ ID NO: 163
  CDS (101)..(655): FRXA02450

SEQ ID NO: 166 - protein, 185 aa, Corynebacterium glutamicum; identical to SEQ ID NO: 164

SEQ ID NO: 167 - DNA, 816 bp, Corynebacterium glutamicum
  CDS (101)..(793): RXA01898
caacggcacttttgcgcccaatgatcgacgccccggtgaactaatccgcctccttgatagcctcctaacggctgtccgcgattaaggctctgaaatactaatgagtgtgaaagcacatgaatctgtcatggattgggtcaccgaggagctccgcagcggtcgcctaaaaatcggtgaccacctccccagcgaacgggcgctctccgaaaccctcggagtttcccgaagctccctgcgcgaggcgcttcgtgtgctcgaagccctcggcaccatttccaccgccaccggatccggcccgcggtctggcaccatcatcactgctgcccctggccaggcgctttccctctccgtgacgctgcagttggtcaccaaccaggtcggccaccacgatatttatgaaacccgccaactccttgaaggctgggctgccctgcattccagcgccgaacgtggcgactgggacgtggcagaagcgttgctggaaaagatggacgacccctcgctaccgctcgaggattttttgcgtttcgacgccgaattccacgttgttatctccaaaggcgcggaaaaccctctgatcagtacgctcatggaagccctccgtttgtccgtggcagatcacaccgttgccagggcccgggcgctccccgattggcgagccacctcggcgcgtctgcagaaagaacaccgcgcaatcctcgcagcacttcgcgcaggcgaatccacagtggccgcaaccttgatcaaagaacacatcgaaggctactacgaagaaaccgctgccgccgaggcctaaatgtcccgcactctgtgggc

SEQ ID NO: 168 - protein, 231 aa, Corynebacterium glutamicum
MSVKAHESVMDWVTEELRSGRLKIGDHLPSERALSETLGVSRSSLREALRVLEALGTISTATGSGPRSGTIITAAPGQALSLSVTLQLVTNQVGHHDIYETRQLLEGWAALHSSAERGDWDVAEALLEKMDDPSLPLEDFLRFDAEFHVVISKGAENPLISTLMEALRLSVADHTVARARALPDWRATSARLQKEHRAILAALRAGESTVAATLIKEHIEGYYEETAAAEA

SEQ ID NO: 169 - DNA, 594 bp, Corynebacterium glutamicum
  CDS (101)..(571): RXA00004
ttgcactgtcatgactgtatcccgcgaagaagtgtccctgccgagccgaactctgaacaatgccttccggaagtattttccaattcccgatgtagggtcagtgctgactcaattgattgaatcatcgattttcgacaacgttgcgagcagggagtcctctgaatttctcggccatgctgccatcgatctacttgctggccttgtctatgaaaaagccactccctatgctccagatgaagcacttagagtggcagtttatggctatattcgggagaaccttggatcctcacaacttacggtcgcagctgtagccggggcgcatagaatcgcggttcgtacgttgcatcgattatttgaaggcgaagcatacggagtagcggaattaatccgacacctccgattagaggcagtatatgaagaccttcgggatcctcgcctccagaacctgaccattttggctatcggcatgcgccacggcatttccagccaagctcatttaacaagactgtttcgcgctaaatatggggtaccgccggcagagtttcgccgagggtatattaatagcgctgcttgagggcaccgcaagcgtggcgc

SEQ ID NO: 170 - protein, 157 aa, Corynebacterium glutamicum
VLTQLIESSIFDNVASRESSEFLGHAAIDLLAGLVYEKATPYAPDEALRVAVYGYIRENLGSSQLTVAAVAGAHRIAVRTLHRLFEGEAYGVAELIRHLRLEAVYEDLRDPRLQNLTILAIGMRHGISSQAHLTRLFRAKYGVPPAEFRRGYINSAA

SEQ ID NO: 171 - DNA, 418 bp, Corynebacterium glutamicum
  CDS (101)..(418): RXA01001
tgggacaccgtgggcatgctgctcatcgtcgtggttgtcgcaacgatgatcgtcgatctcatctccggcaccatccgccgccgcatcatgaagggggctagtgaccgtgtcgtggcaccaagcaactgacgctccaccaagcatccgcatcaccacgcttgcgccatcgctgcagcctaatcagcgcaaagtcgccgaagtcatgcttgtcgacgcccccagcatcgtcgaactgaccgctcagggccttgcagatcgcgtgggggttgggcgtgccaccgtcatccgcaccgcccagtccttaggctacgacggattcccgcagctgcgcgtcgccctggcgcaggaactggcactggcgcagggcgcgtcgagaagcatggttgaaggagcgttaagctcctcgttgcttggtcat

SEQ ID NO: 172 - protein, 106 aa, Corynebacterium glutamicum
VTVSWHQATDAPPSIRITTLAPSLQPNQRKVAEVMLVDAPSIVELTAQGLADRVGVGRATVIRTAQSLGYDGFPQLRVALAQELALAQGASRSMVEGALSSSLLGH

SEQ ID NO: 173 - DNA, 1578 bp, Corynebacterium glutamicum
  CDS (101)..(1555): RXA01375
caagcagccaatggccgcgtatgaaaacccccgctccataaatacagaacacatacagaacttgaccgacaatctaattaccgcgaagggttagcagcacgtgactgaaaagtatcgtcccgtccgtgacattaagcctgctccggcagcaatgcaatcaactaaacaagcgggccatcctgtgttccgaagcgttgtcgcttttgtttcagtgctggtgttggtggtatcgggtttggggtatcttgctgtcggaaaagtggatggtgtcgcttctggcaacttgaaccttggtggcggtcgcggcatccaggacggcaatgctgctgacggtgctaccgatattttgttggtgggttctgattcccgttccgatgctcagggcaacacgctgactgaggaggagctggcgatgctccgcgcaggcgacgaggagaacgacaacaccgatacgatcatggtgattcgtgttcctaacgatggttcctctgccaccgctgtcgcgattcctcgcgatacctatattcatgatgacgattacggcaacatgaagatcaacggcgtttacggtgcgtacaaggatgcccgtcgcgctgagctcatggaacagggtttcaccaatgagtcagagctggaaacccgggcgaaggatgctggccgagaaggtttgatcgatgctgtgtcagatctcaccggcatcaccgtcgatcactacgccgaagttggccttttgggattcgtcctgctcaccgatgctgtcggtggtgtcgaagtctgcctcaacaacgccgtcgatgagcctttatccggcgccaacttccctgcaggccgtcaaaccctcggtggctccgatgcgttgtcttatgtgcgccagcgccacgatctcccccgcggcgacctcgaccgcatcgtccgccagcagtcgtatatggcatcgcttgttaatcaggtgctgtcttctggaacactcaccaaccctgcaaagctttccgcacttgctgatgccgtcacccgctccgtcgtcatcgacgaaggctgggagatcatgagctttgccactcagctgcagaacctcgcgggcggcaacgtcacatttgccaccatcccggttacctctatcgacggcaccggcgattacggcgagtccgttgtcaccatcgatgtcaaccaggtgcatgcattcttccaagaagcactcggcgaagcagagccagctccagaagacggctccgacgatcaatctgctgatcaggcccctgacctaagcgaagtcgaggtccacgtcctcaacgcttcctacgtcgaaggcctcgccaacggtatcgccgcgcaactgcaggaattgggttactccatcgcagagaccggcaacgcagcggaaggcctctactacgagtcccagatcctcgccgccgaagaagacagcgccaaggccctcgcgatttccgaagccctcggtggtctcccatcgtggccaactcttccctcgacgacaacaccgtcatcgtcgtatccgccggcgattacgctggccctaccgcggaagcaaacgccgtgacatccagcaccgtcggccag

SEQ ID NO: 174 - protein, 485 aa, Corynebacterium glutamicum
VTEKYRPVRDIKPAPAAMQSTKQAGHPVFRSVVAFVSVLVLVVSGLGYLAVGKVDGVASGNLNLGGGRGIQDGNAADGATDILLVGSDSRSDAQGNTLTEEELAMLRAGDEENDNTDTIMVIRVPNDGSSATAVAIPRDTYIHDDDYGNMKINGVYGAYKDARRAELMEQGFTNESELETRAKDAGREGLIDAVSDLTGITVDHYAEVGLLGFVLLTDAVGGVEVCLNNAVDEPLSGANFPAGRQTLGGSDALSYVRQRHDLPRGDLDRIVRQQSYMASLVNQVLSSGTLTNPAKLSALADAVTRSVVIDEGWEIMSFATQLQNLAGGNVTFATIPVTSIDGTGDYGESVVTIDVNQVHAFFQEALGEAEPAPEDGSDDQSADQAPDLSEVEVHVLNASYVEGLANGIAAQLQELGYSIAETGNAAEGLYYESQILAAEEDSAKALAISEALGGLPSWPTLPSTTTPSSSYPPAITLALPRKQTP

SEQ ID NO: 175 - DNA, 508 bp, Corynebacterium glutamicum
  CDS (101)..(508): RXA02831
cgaactggcgcgtgtcttgtccgacgcagcctagcccgcctttattgacccctccggcacgcttcgatagggctaggaaaaccctgtcggaggagcgcccatgacacatcggatcacacccgaactctcggccgaattgcggggggtggcccacagccttgcagatgcggcgcggcccgtcaccttgcaatacttccgcacagcagtcgcggcagataacaaaggcgcgctgcgcgggatggcttacgaccccgtcaccattgccgaccgtgcaagcgaacaggccatgcgtgacattctggcccgtctacgccccgatgatgcgatcttgggtgaagaattcggccccaaagcgggcacaacgggcctcacatgggtgctggacccgattgacggcactcgcgcatatatcgcgggcgcgcccacttggggcgtgctgatcgcagtatcggatgatcagggcccgctgttcggtatcgtcgaccaaccctatattggcgagcgtttt

SEQ ID NO: 176 - protein, 136 aa, Corynebacterium glutamicum
MTHRITPELSAELRGVAHSLADAARPVTLQYFRTAVAADNKGALRGMAYDPVTIADRASEQAMRDILARLRPDDAILGEEFGPKAGTTGLTWVLDPIDGTRAYIAGAPTWGVLIAVSDDQGPLFGIVDQPYIGERF

SEQ ID NO: 177 - DNA, 696 bp, Corynebacterium glutamicum
  CDS (101)..(673): RXA01110
atcatcgacatgctccggaaaacttaaaaattcccggacggttcacgcagattaccctagcaaagcaatctagctgacgacccaatatagtcctgtcattatgctggcaattgtgcagctatcaaaagaatctattattggcgcagccgtttcgatcttgagcgaattcggtttgtcggatatgaccatgcgccgcgtcgcaaagcagttaaatgtcgcgccgggcgcgctgtattggcattttaaaaataagcaggagcttatcgacgccacctcgcgctatctcctcgcgcctgtcttggggcgcaacgacgagcagcgagcaagcatttccgcgcaggaaacctgcgcggaaatgcgttcgctgatgatgcaaaccaaagatggtgcggaagtcatcagtgccgcactgagtaatcagcaattgcgccaagaattggaatcactcatttctgactctttaaaggaacctaatgaggttggcgcttttacgctgctacattttgtggtgggtgcagtattaacagaacaaactcagctgcagatgcacgagttcacggctggcgcgggagatgacacgcaagaaaaccctgccgatgcaaactttgaggagagattcaatcaaggaatagaaatcattctggtgggtctagacgcgcttgggcatataagatgacgttccatgacatcaacgat

SEQ ID NO: 178 - protein, 191 aa, Corynebacterium glutamicum
MLAIVQLSKESIIGAAVSILSEFGLSDMTMRRVAKQLNVAPGALYWHFKNKQELIDATSRYLLAPVLGRNDEQRASISAQETCAEMRSLMMQTKDGAEVISAALSNQQLRQELESLISDSLKEPNEVGAFTLLHFVVGAVLTEQTQLQMHEFTAGAGDDTQENPADANFEERFNQGIEIILVGLDALGHIR

SEQ ID NO: 179 - DNA, 861 bp, Corynebacterium glutamicum
  CDS (101)..(838): RXA00253
acccatgttagatgttttattcagggattttagttgatatgtccagtatctcgctgaaaacgctggttgtcttgtagaaaaaggcgtaacgtcatataacatgcctagcgaaactatgaaaccagccgtagcgtcaactctggcggccacttccacgggacgtcgtcctggacgccccacccaacgtatcctttccgtcgaatccatagtggagcgcactttaaacattgccggccgcgaaggattcgctgccgtgaccatgaaccgcctcgcccgagacatgggtgtcacccctcgcgcactgtataaccatgtgctaaatcgtcaagaaatcattgatcgcgtctgggtgcgcatcatcgatgatatcaaggtgcccgatcttgatccggacaattggcggcaatctattcatacgctgtggagctcattgcgcgaccaattccgtgagactccacgtgttcttctggtcgcgctggatgaacagatctctactcagggcacttccccactgcgaatcgcgggtgcggaggagtccttgaagttcttgactgatatcgggctgtccctcaaggaagcaaccatcatccgggagatgatgatggctgatgtcttcagcttcaccctgacttctgactacacctttgacaatcgtccagagggcgaaaagccggatgtgtttgctccggttcctaagccatggcttgatgagaacccagatgtggaagcgccactgacccgtaaagcagtcgaagagtccgtctcaacttctgacgaactcttcggctacatggtggaggctcgcattgcttatattgaaaagctgcttgccgccaaatagtttctaaaggttattgaggg

SEQ ID NO: 180 - protein, 246 aa, Corynebacterium glutamicum
MPSETMKPAVASTLAATSTGRRPGRPTQRILSVESIVERTLNIAGREGFAAVTMNRLARDMGVTPRALYNHVLNRQEIIDRVWVRIIDDIKVPDLDPDNWRQSIHTLWSSLRDQFRETPRVLLVALDEQISTQGTSPLRIAGAEESLKFLTDIGLSLKEATIIREMMMADVFSFTLTSDYTFDNRPEGEKPDVFAPVPKPWLDENPDVEAPLTRKAVEESVSTSDELFGYMVEARIAYIEKLLAAK

SEQ ID NO: 181 - DNA, 888 bp, Corynebacterium glutamicum
  CDS (101)..(865): RXA01118
agtggaagaaatgctcttgttaatcatgtgagacatgctaacgtaatgttcatcatatgcacaagggttcgcaatgcgaacaaaaagaggagttgatgggatggtcgaacaatcgccagatttcgtacaatcatttgcccgcggcttatctgtgatccgaagtttcagcgcagataatccatcgcaaacactgtccgaagtcgccagccaaactggactctcaagggccaccgctaggcgctttctccacaccttgaccgaccttggatatgcggtaaacaacgattcccggttccagctcacaccacgtgttttggagcttggagcaagctacctttccgcattgtccctgcctgcgatcgcgcagccccgcctggaggtactctcccgccaggtcggcgaatcaagctccatgtccgtactcgacggcactgacatcatctacgtttgccgcgttccggtgcgccgcatcatgacggtgaacatcaccatcggcacccgtttccctgcgtacgccacctccatgggacgcatcatgctggccaaccttcccgaagaagaattagatgaaatgctggcggcggcaccccctgaacagttgaccacccggtcactgacctccatcgcctcaatccgggaagagatcattgctacccgcgaaagggggtggtcattggtggatcaggagctcgagccgggcctgcgttcgctcgcggcgccgatcaccaatgcccagggcgaagtggttgcttccatcaatgtgtcgacccaatcggcatcacattcggtggaagatatccgcaagctggtgctgccgcagcttttagaaacggctcaagcaatttcgacagatctctctgcactctaaattaaggatcaaaaaatgaa

SEQ ID NO: 182 - protein, 255 aa, Corynebacterium glutamicum
MVEQSPDFVQSFARGLSVIRSFSADNPSQTLSEVASQTGLSRATARRFLHTLTDLGYAVNNDSRFQLTPRVLELGASYLSALSLPAIAQPRLEVLSRQVGESSSMSVLDGTDIIYVCRVPVRRIMTVNITIGTRFPAYATSMGRIMLANLPEEELDEMLAAAPPEQLTTRSLTSIASIREEIIATRERGWSLVDQELEPGLRSLAAPITNAQGEVVASINVSTQSASHSVEDIRKLVLPQLLETAQAISTDLSAL

SEQ ID NO: 183 - DNA, 654 bp, Corynebacterium glutamicum
  CDS (1)..(654): RXA01840
atctctgaagaagacggcgccagcgaacccgccaccttcgccgaacgctcccaacgcctcatccagcaggaatgcgttgcagccgtgtttggtggatggacctccgcctcccgcaaagcaatgctccccgtctttgagggcaataactccctgctgttctacccggtgcagtacgagggcatggaatcctcgccgaatattttctacaccggcgccaccaccaaccagcagatcatcccggctcttgattacctgcgtgaaaacggcctgaaccgccttttccttgtcggttccgattatgttttcccacgcactgcaaattccatcatcaaggactacgccgaagccaatggtatggaaatcgtcggcgaagactacgcgccgttgggatccaccgacttcaccaccatcgccaaccgcatgcgtgactccaacgcagatgccgtgttcaacactttgaatggcgattccaacgtggcgttcttccgccagtacaacagcctcggcttcaatgcagacacccttccggtgatgtcagtatccattgcggaagaagaagtcggaggcatcggcaccgcaaatattgagggccagctggtggcgtgggactactaccaaaccatcgacaccccagaaaacgagaccttcgtggag

SEQ ID NO: 184 - protein, 218 aa, Corynebacterium glutamicum
ISEEDGASEPATFAERSQRLIQQECVAAVFGGWTSASRKAMLPVFEGNNSLLFYPVQYEGMESSPNIFYTGATTNQQIIPALDYLRENGLNRLFLVGSDYVFPRTANSIIKDYAEANGMEIVGEDYAPLGSTDFTTIANRMRDSNADAVFNTLNGDSNVAFFRQYNSLGFNADTLPVMSVSIAEEEVGGIGTANIEGQLVAWDYYQTIDTPENETFVE

SEQ ID NO: 185 - DNA, 1002 bp, Corynebacterium glutamicum
  CDS (101)..(979): RXA00400
tgttcacagtcagccacctgaggatgaagacatcgatcgaattcagaaaaagctgcaggctgagggcttccccacccgcaattaattaattggagttttgttgttcactcttgaacagttgcggtgttttgtcgccgtcgccaatcatcttcatttcggaaaagctgctgcagagctatccatgacgcagccgccgttgagtcgtcagattcaaaagctggagaagatcgtcggtgcaaccctgcttgatcgtgacaaccgcaaggtggaactgaccactgcgggtttcgcatttttgaaggatgctcgcctcattctcaattccaccgagaaggcggctgagcgcgcacgattggctagctctggcatgtggggacagctcaatattggatacaccgctgcagcgggtttttccattctgggcccgacgttgaatcagttgcatgagaagatgccgggggtcagtgtcgatctttttgagatggtctccaccgagcagatcgccgccttggaatctgggctactggatcttggcattggccgattgagctcgccagttgagggtcttcaaactcgacgtctccaggcagattccttggttcttgcagctccgaaggggcatccacttcttgatcagaatcgaccactgttgcggaagcatctgactggggttccttttctgcagcactctcccaccaaggcgaagtacctctacgacatcgttgttagaaacttcacgatcaatgatgcgcaggtgcaacatacgctgagccagatcaccacgatggttagtctggtggcctctggactgggtgttgcgctggttccggagtctgcgaaaaaactcaattacagcggtgttgagtatcgccatttttatgatctacctgttggtttagcggagctgcaggctatttattccacctcgaatgataatcctgcggtgcggaaattcatcaaaaacattgacgataccttttaagcatttcaacatgccaaact

SEQ ID NO: 186 - protein, 293 aa, Corynebacterium glutamicum
LFTLEQLRCFVAVANHLHFGKAAAELSMTQPPLSRQIQKLEKIVGATLLDRDNRKVELTTAGFAFLKDARLILNSTEKAAERARLASSGMWGQLNIGYTAAAGFSILGPTLNQLHEKMPGVSVDLFEMVSTEQIAALESGLLDLGIGRLSSPVEGLQTRRLQADSLVLAAPKGHPLLDQNRPLLRKHLTGVPFLQHSPTKAKYLYDIVVRNFTINDAQVQHTLSQITTMVSLVASGLGVALVPESAKKLNYSGVEYRHFYDLPVGLAELQAIYSTSNDNPAVRKFIKNIDDTF

SEQ ID NO: 187 - DNA, 1500 bp, Corynebacterium glutamicum
  CDS (101)..(1477): RXA02787
cacgattcgcagacgacgtggtgcgtttgttcctcaaaaatgactagctgaagagcaccggttgcttggttgtttcagccaagcgactaacctgtgcactatggcccaggattcactttttgaaacgcccgaaacaccgggatccgcaggcaacacaagcagcgtgagcaattccaaagccgcctcgaagtattttcacccaggcggacacgcaccccttgctgcccgcatgaggccaaggacgcttgatgaagtggttggccaacagcatttgctgggggagggcaggccacttcgccggctcattgaaggttcaggggatgcctccgtcattttgtatgggcctcccggcactggaaaaacaaccattgcctcattgatttctgcagctgcaggcgatcgctttgtggcgatgtcggcgctgtcctcaggtgtgaaagaagtccgcgccgttattgaacgtgcgaggatggatctgcaattagggcagcgcaccgtgctgtttattgatgaggttcataggttttccaaaactcagcaggacgcgttgctctctgcagtggaaaaccgcaccgtgttgctcgttgcagcgaccactgagaacccctccttttcagtggtgtctccactgctgtccaggtccttgctgctccagttggaatctttaagcgatgaggatattaaaacagtccttaataaagcgcttgaagatgagcgtggacttgccggtcgaatcaccgccaccgatgaagcagttgaccagttggttcttcttgccggtggcgatgcccgccgaggcctgacctacattgaagccgctgcagaagccgtagaagatggcggcgttttagatattgacaccgtcatggccaacgtgaaccgcgcagtggtccgctatgaccgcgatggcgatcagcactatgacgtggtcagtgcctggatcaaatcaattagaggctccgatgtagacgcagccttgcactacttggcgcgcatgattgatgccggtgaagacccacggtttattgcccgccggttggtggttcactcaagtgaagacatcggtatggctgatccttcggccatgcaagtggccattgctgcagctcaagctgtccaattaatcggtatgccagaggcgcggatcaatttggcgcaagcgaccattcatttggctcttgctcccaaatccaatgctgtcatcatggccatggatgctgctttgactgatgttcagcaaggccacatcggtaccgttcctgcgcatcttcgcgatggtcactatgaaggcgccaaaaagctcggaaatgcagtgggatattcctatcctcacgatgatcccaggggagtggtccggcaagaatatttaccggagaacctgcgcgatcgggtctattacgagcccaccacacacggtggagagaagcggattgccgagtacattggcaggcttcgtcgtataatccgtggaaccaagtagcccgggttgctcaacaccta

SEQ ID NO: 188 - protein, 459 aa, Corynebacterium glutamicum
MAQDSLFETPETPGSAGNTSSVSNSKAASKYFHPGGHAPLAARMRPRTLDEVVGQQHLLGEGRPLRRLIEGSGDASVILYGPPGTGKTTIASLISAAAGDRFVAMSALSSGVKEVRAVIERARMDLQLGQRTVLFIDEVHRFSKTQQDALLSAVENRTVLLVAATTENPSFSVVSPLLSRSLLLQLESLSDEDIKTVLNKALEDERGLAGRITATDEAVDQLVLLAGGDARRGLTYIEAAAEAVEDGGVLDIDTVMANVNRAVVRYDRDGDQHYDVVSAWIKSIRGSDVDAALHYLARMIDAGEDPRFIARRLVVHSSEDIGMADPSAMQVAIAAAQAVQLIGMPEARINLAQATIHLALAPKSNAVIMAMDAALTDVQQGHIGTVPAHLRDGHYEGAKKLGNAVGYSYPHDDPRGVVRQEYLPENLRDRVYYEPTTHGGEKRIAEYIGRLRRIIRGTK

SEQ ID NO: 189 - DNA, 597 bp, Corynebacterium glutamicum
  CDS (101)..(574): RXA00287
atgggctcaacgctgcaaacatcatggaggggcaccggctcgttgagcagggtaaaacctcaggaaaaattgttgtgagggtataaagaggacttgaaaaatgcaccatctacgctatgaatcaccaatcggagagcttcttcttgttgcaagtgaccaagggctaacctatgtggcattctccgatgaaaactacgcagcttgtactgtcgggtcgaccccgggaaccaatgcggtgctggaacaggcagttgctgagcttgaagaatacttcgcagggaaacgtaaagagttcagcactcccctggattggccaagccaaaatctgctgagcttccgcggtaaagtgcaggaatttttgctgtccattccttatggggagagtaaaacttacaaacagatcgccgctgagcttaataatgtgggcgcggttcgtgcagtgggaagcgcctgcgccaccaaccccttgccaatctttgctccttgtcaccgagtactgcgcactgatggggcgttaggtggctacagaggaggcttggaagcaaaacagtggctgttggagctggaacgtccttagtttgtgtccgcgcacggagc

SEQ ID NO: 190 - protein, 158 aa, Corynebacterium glutamicum
MHHLRYESPIGELLLVASDQGLTYVAFSDENYAACTVGSTPGTNAVLEQAVAELEEYFAGKRKEFSTPLDWPSQNLLSFRGKVQEFLLSIPYGESKTYKQIAAELNNVGAVRAVGSACATNPLPIFAPCHRVLRTDGALGGYRGGLEAKQWLLELERP

SEQ ID NO: 191 - DNA, 1194 bp, Corynebacterium glutamicum
  CDS (101)..(1171): RXA01687
ttagagatcaacaaatagactgaacggtctatttgttcacgttttcgcagctaaattcttgaatctaaactattcccaaatagaccatacggtctaacatgtgttcatgcttgcacagcgaacactccccattcacatcaccgccccccacctacccgtcgcgcgcgtatttcatcaaattcgcgccacagacgccgatcgcacctctctgcaacgcgatcttgaactctcccaagctggcatcacgcggcatgtgtcagcgcttattgatgcaggtctcgtggaggaaacccgagtggattccggggcgcgctcggggcgaccgcgcacaaaattaggcatcgacggccgccatctcaccgcctggggagtgcacattggcctgcgcagcacggattttgcggtgtgcgatttagccggccgagtgattaggtatgagcgcgtggaccatgaagtttcacactccacgccgtcggaaacgctgaattttgtcgcacataggttacaaacattgagcgccggcttgcccgagccccgcaatgtgggcgtggcattatctgcccacttaagcgccaacggaaccgtcacttccgaagattatggctggtcagaggtggaaattggggcacacctccccttccccgccaccatcggatcaggtgttgcggcgatggccggttcggaaattatcaacgcgccactgacccaatccacgcagtccacgctgtatttctacgcccgcgaaatggtctcccacgcctggattttcaacggcgctgtccaccgccccaacagcggccgcacgccgacggcgttcggaaatacaaataccttaaaagatgcttttcgacgtggactcacaccaacaactttctccgatttagtccaactctcccacaccaacccgcttgcacgacagatcctcaacgagcgcgcccacaaacttgccgacgccgtaaccaccgccgttgatgttgtcgaccccgaagccgtcgtcttcgccggcgaagccttcaccctggatccggaaactcttcgcattgtggtgacccagctccgagcaaacaccggcagccaactgagaatccaacgcgcagacgcctacattctccgcaccgcggccatccaggtggcgctgcatccgatccgtcaagatccgttggcatttgtgtaattaccacccatgttgcgggg

SEQ ID NO: 192 - protein, 357 aa, Corynebacterium glutamicum
VFMLAQRTLPIHITAPHLPVARVFHQIRATDADRTSLQRDLELSQAGITRHVSALIDAGLVEETRVDSGARSGRPRTKLGIDGRHLTAWGVHIGLRSTDFAVCDLAGRVIRYERVDHEVSHSTPSETLNFVAHRLQTLSAGLPEPRNVGVALSAHLSANGTVTSEDYGWSEVEIGAHLPFPATIGSGVAAMAGSEIINAPLTQSTQSTLYFYAREMVSHAWIFNGAVHRPNSGRTPTAFGNTNTLKDAFRRGLTPTTFSDLVQLSHTNPLARQILNERAHKLADAVTTAVDVVDPEAVVFAGEAFTLDPETLRIVVTQLRANTGSQLRIQRADAYILRTAAIQVALHPIRQDPLAFV

SEQ ID NO: 193 - DNA, 1287 bp, Corynebacterium glutamicum
  CDS (101)..(1264): RXA01935
atacgagaaaccaaaaattaccggcatctaaatacttatccatgcccatttacagacaatgcggtctagataacaagacccctattagacagcgttgtctatgattggctatggtttacctatgcccaatcaggcccacttctctgcgtcctttgcccgcccctctaccccggctgcaaagtgcatgcaccatatccgcctcggccagcaactcattagaaatgagctggtcgaggccacaggtctgtcccaaccgactgtcacccgcgcagtcaccgctttaatgcaggcaggtttggttcgtgaacgccctgatctcacactctcatcgggccctggtcgtcccaatattcctctagaactcgctccaagtccatggattcatgcaggcgtggcaatcggcaccaagtcttcctacgtcgctttgtttgataccaagggtcgcacccttcgtgatgccatgctggaaatctcagcagctgatttagatccagacactttcatcgaacacctcattgctggtgtcaaccgcctcaccactggtcttgatctaccactggtaggtattggtgttgccacctcaggaaaagtcaccaacgcaggcgttgtcaccgcaagcaacttgggctgggatggcgttgatatcgctggccgcctgaactaccaattcagcgttccagcaaccgtggcatcagcaattcctgccatcgcagcttctgaactgcaggcttccccacttccccaccctgagcagccaactcccatcaccttgaccttctacgccgatgactctgtgggcgcggcctacagcaatgatttgggagtacatgtcattggaccactggctacaactcgtggatcaggtttggatactttgggcatggctgccgaagatgcgctgagcacccaaggtttcttaagcagggtttctgatcagggtatctttgccaacagccttggtgagctagtcaccattgctaaagacaatgaaaccgcacgggaattcctcaacgatcgcgcgaccctgctggctcacactgccgcagaagctgccgaaacagttaagccatccaccctggttctctcgggatcggcgttttccgaagatccacaaggtcggtcggtgttcgcttcccaattgaagaaggaatacgacgcagacattgagctccggttgatccccacccaccgggaaaacgtccgcgcagcagctcgagcagtcgcacttgatcgactactcaacgagccacttactctcgtaccctaacctcatctaagctcagtgct

SEQ ID NO: 194 - protein, 388 aa, Corynebacterium glutamicum
MIGYGLPMPNQAHFSASFARPSTPAAKCMHHIRLGQQLIRNELVEATGLSQPTVTRAVTALMQAGLVRERPDLTLSSGPGRPNIPLELAPSPWIHAGVAIGTKSSYVALFDTKGRTLRDAMLEISAADLDPDTFIEHLIAGVNRLTTGLDLPLVGIGVATSGKVTNAGVVTASNLGWDGVDIAGRLNYQFSVPATVASAIPAIAASELQASPLPHPEQPTPITLTFYADDSVGAAYSNDLGVHVIGPLATTRGSGLDTLGMAAEDALSTQGFLSRVSDQGIFANSLGELVTIAKDNETAREFLNDRATLLAHTAAEAAETVKPSTLVLSGSAFSEDPQGRSVFASQLKKEYDADIELRLIPTHRENVRAAARAVALDRLLNEPLTLVP

SEQ ID NO: 195 - DNA, 744 bp, Corynebacterium glutamicum
  CDS (101)..(721): RXN02270
cagcttgagcaggcatcggccgatgacgtaccaggagtttcggcatgatccggcggcgtcgcatcgctattgggcgcggtcgtttgtggggtggcgggtgatggatcaggcgcggccgaatcgaacgcactacgccatggttgagctggagcagcatggttttttaagtggtgtggtcacccaaaatgtcgatggtttacacgcggaagcaggcacgaaaaacctggtcgcgctgcatggtgatctcgcccatgtgatgtgtttgaactgcggtttcggggaggatcgacacctctttgatgaacgtctcgaagccgccaaccccggctacgtcgcttccattcgcctggaaccgggcgcagtcaaccccgacggcgacgtcttcctcgacgaagaacaagtacgccgcttcaccatgatcggctgcttgcgctgcggctcgctcatgctcaaaccagacgtggtttacttcggcgaacccgtgcccgccgcgcgcaaaaaagatttaaaaaagcttctcgacgcctcctccagcctcttaatcgccggctcctccctagccgtcatgagtggataccggatcgtcatcgaagcgcaacgtcaaggaaaacaagtgtctgtcatcaacggcggcccaggtcgggcggattcccgcgtggacattttgtggcgcacccgcgttgcaccggcctttgatgacattttggacgcgctggacctttagacttttggtggcttaagttc

SEQ ID NO: 196 - protein, 207 aa, Corynebacterium glutamicum
MDQARPNRTHYAMVELEQHGFLSGVVTQNVDGLHAEAGTKNLVALHGDLAHVMCLNCGFGEDRHLFDERLEAANPGYVASIRLEPGAVNPDGDVFLDEEQVRRFTMIGCLRCGSLMLKPDVVYFGEPVPAARKKDLKKLLDASSSLLIAGSSLAVMSGYRIVIEAQRQGKQVSVINGGPGRADSRVDILWRTRVAPAFDDILDALDL

SEQ ID NO: 197 - DNA, 744 bp, Corynebacterium glutamicum; identical to SEQ ID NO: 195
  CDS (101)..(721): FRXA02270

SEQ ID NO: 198 - protein, 207 aa, Corynebacterium glutamicum; identical to SEQ ID NO: 196

SEQ ID NO: 199 - DNA, 603 bp, Corynebacterium glutamicum
  CDS (101)..(580): RXA01241
gatgctgcaggacttcaatccacttcttccgttgcttaccagcttaaagagctagagaagaagggcttcctgcgcatgggaccctaataagcctcgcgcggtggatgttcgccaccttccagaaactgaaagccgttcctccaaggctgctacacaggcaaagagcaaggcccctcaggccggggtccatgatcctgagttagctggccagacctcatttgtcccagtggtgggcaaaattgccgctggtagcccgatcaccgctgagcagaacatcgaagagtactacccactccccgcagaaatcgtcggagacggtgacttgttcatgctccaggttgttggcgagtccatgagggatgctggcatcctcaccggcgactgggttgttgttcgttcccagccggtagctgagcagggcgagttcgtcgcggcaatgattgacggtgaagccaccgtgaaggaattccacaaggattcatctggcatctggctcctgccacacaacgatacgtttgccccaattcctgctgagaatgcagaaatcatgggcaaggttgtttccgtgatgcgcaagctttaagtcgcttttcaggttcccgc

SEQ ID NO: 200 - protein, 160 aa, Corynebacterium glutamicum
VDVRHLPETESRSSKAATQAKSKAPQAGVHDPELAGQTSFVPVVGKIAAGSPITAEQNIEEYYPLPAEIVGDGDLFMLQVVGESMRDAGILTGDWVVVRSQPVAEQGEFVAAMIDGEATVKEFHKDSSGIWLLPHNDTFAPIPAENAEIMGKVVSVMRKL

SEQ ID NO: 201 - DNA, 777 bp, Corynebacterium glutamicum
  CDS (101)..(754): RXA02127
tttgctaataccagggtaaacagccactcccagggcaattgaaacacggattagatggattgagggaacatcccaaacccaaagaacctaggagaacattatgagtgagacagttttagtcataggagcaacaggaagcataggccgacatgttgtctcggaagcacttaaccagggataccaagttaaggcatttgtccgtagcaagtcccgtgcacgggtgcttccagctgaggcagagattatcgtaggagacctgcttgatccttcctcgattgagaaagctgtaaaaggcgtcgagggaatcattttcactcacggcacctccactcgtaaaagcgatgtgcgggatgttgattacaccggcgttgccaacacgttgaaggcagtcaagggaaaagatgtaaaaattgtgctgatgaccgccgttggaacgacccgcccaggtgtggcttatgccgagtggaagcgacatggcgagcaacttgttcgagctagcggacacggttacaccattgttcgccctggttggtttgattacaacaacgatgacgagcgtcagatcgtcatgcttcaaggcgacaccaatcagtcgggtggcccagccgatggcgtgattgcgcgtgatcaaatcgcgcgagttttggttagcagtttgaatgatgcaaaagcacgaaacaaaaccttcgagctttctgccacttatggacctgcccaaggaaagcctgaccgcaacttttgcagcacttcgggctgacgataccgatgatattgacg

SEQ ID NO: 202 - protein, 218 aa, Corynebacterium glutamicum
MSETVLVIGATGSIGRHVVSEALNQGYQVKAFVRSKSRARVLPAEAEIIVGDLLDPSSIEKAVKGVEGIIFTHGTSTRKSDVRDVDYTGVANTLKAVKGKDVKIVLMTAVGTTRPGVAYAEWKRHGEQLVRASGHGYTIVRPGWFDYNNDDERQIVMLQGDTNQSGGPADGVIARDQIARVLVSSLNDAKARNKTFELSATYGPAQGKPDRNFCSTSG

SEQ ID NO: 203 - DNA, 861 bp, Corynebacterium glutamicum
  CDS (101)..(838): RXA00583
ctgagctggccgcagcagtaagggaacgccgagcagcagccaagtaattaagggcgctagactgttaaatgtgttaaacctgcccagactgctgtacccggtgtatgagcgccgtcttttaagagaactagacggcgccaaacagcccggtcacgttgccatcatgtgtgatggcaaccgacgctgggcccgggaagcgggcttcactgatgtcagccatgggcaccgagtgggtgccaaaaagatcggcgagatggtccgctggtgtgatgatgtagacgtcaatctcgtgaccgtttatttgctgtctatggaaaaccttgggcgatcctccgaagagctgcaattgctgttcgatatcatcgccgatgtcgctgatgaactcgcgcgtcctgaaaccaactgtcgagtccgcctcgttggtcatttagatctgctcccagacccagttgcttgtcgtttacgcaaagctgaagaagctaccgttaacaacacaggcatcgcagtcaacatggctgtcggttatggcggacgccaggaaatcgttgatgccgtgcaaaaacttctgaccatcggcaaggacgagggcctaagcgttgatgaactgatcgaatccgtcaaggtagatgcgatctccactcacctgtacacctctggccaaccagacccagacctggtgatccgcacctctggtgagcagcgactttccggattcatgctgtggcaatctgcctactccgaaatctggttcacagacacctactggccagccttccgacgcatcgacttcctccgcgccattcgcgactactcgcagcgcagcagaagattcggtaaataacttattctccaaggagagac

SEQ ID NO: 204 - protein, 246 aa, Corynebacterium glutamicum
VYERRLLRELDGAKQPGHVAIMCDGNRRWAREAGFTDVSHGHRVGAKKIGEMVRWCDDVDVNLVTVYLLSMENLGRSSEELQLLFDIIADVADELARPETNCRVRLVGHLDLLPDPVACRLRKAEEATVNNTGIAVNMAVGYGGRQEIVDAVQKLLTIGKDEGLSVDELIESVKVDAISTHLYTSGQPDPDLVIRTSGEQRLSGFMLWQSAYSEIWFTDTYWPAFRRIDFLRAIRDYSQRSRRFGK

SEQ ID NO: 205 - DNA, 582 bp, Corynebacterium glutamicum
  CDS (101)..(559): RXA00592
atacttggggtgaggacggctgggagttggtctcggtcatgcctggtatgaaccctgagaacctcgttgcttacatgaagcgtgaggtggcttagttcttatggcttctaattccgaacgccttgcagagctgggcatttctcttccttccgttgcagcgcctgttgctgcgtatgttcctgcgattcagaccggtaaccaggtgtggacttctggtcagctgcctttcgttgatggtcagcttccggccaccggcaaggttggcgctgaggtttccgctgaggatgcggagaagttggctcgtgcggctgcgctaaacgctcttgctgcgattgatgcgcttgttggcattgataaggtcactcgcgttttgaagattgttggtttcgtggcgtctgctgatgatttcagtggtcagcctgctgtcgtcaacggtgcttccaatttgatgggtgaggttttcggcgaggctggggcgcatgcgcgttctgctgtgggcgtggcggagttgccgctcaactcgcctgtcgaggtcgaggttatcgtcgagatcgcgcagtagcacgcttttcgacgcaaaat

SEQ ID NO: 206 - protein, 153 aa, Corynebacterium glutamicum
MASNSERLAELGISLPSVAAPVAAYVPAIQTGNQVWTSGQLPFVDGQLPATGKVGAEVSAEDAEKLARAAALNALAAIDALVGIDKVTRVLKIVGFVASADDFSGQPAVVNGASNLMGEVFGEAGAHARSAVGVAELPLNSPVEVEVIVEIAQ

SEQ ID NO: 207 - DNA, 182 bp, Corynebacterium glutamicum
  CDS (1)..(159): RXA00630
gcaaagatcctggataacgtgtggcactacgattttggtggcgacggcaacgtcgtggaatcctacatctcctacctgcgccgcaaggtggacacccaggatccgcagctaattcagactgttcgtggcgttggatatgttctgcgcaccccacgtagctaaattctcctatggaaaatcct

SEQ ID NO: 208 - protein, 53 aa, Corynebacterium glutamicum
AKILDNVWHYDFGGDGNVVESYISYLRRKVDTQDPQLIQTVRGVGYVLRTPRS

SEQ ID NO: 209 - DNA, 484 bp, Corynebacterium glutamicum
  CDS (101)..(484): FRXA00638
aatttcaactctttcagtacattcacagttagtattcagtggtgttgaagttccagggtgttcactagtgggaagttaatcattccgctaatggacaccaatggaagagataaaaatggacaaccagtctgacggacaaatccgcgtactcgtcgttgatgacgagccaaacatcgtcgagctgctcaccgtaagccttaaattccaaggcttcgcagtgatgaccgccaacgatggcaatgaagccctgaagattgctcgtgagttccgtccagacgcatacatcctcgatgtcatgatgccaggaatggacggcttcgagctgctgaccaagctgcgcggcgaaggccttgacagcccagttctgtacctcaccgcaaaggatgccgtggagcaccgcatccacggcctgaccatcggcgctgacgactacgtgaccaagcctttctccctggaagaagtaatcacccgcctgcgcgtgatt

SEQ ID NO: 210 - protein, 128 aa, Corynebacterium glutamicum
MEEIKMDNQSDGQIRVLVVDDEPNIVELLTVSLKFQGFAVMTANDGNEALKIAREFRPDAYILDVMMPGMDGFELLTKLRGEGLDSPVLYLTAKDAVEHRIHGLTIGADDYVTKPFSLEEVITRLRVI

SEQ ID NO: 211 - DNA, 1251 bp, Corynebacterium glutamicum
  CDS (101)..(1228): RXA00894
gatgccctcgttttggtgctggtccaagacgtagcgctgtagttttctcggatttgttggaactagtcgtaattagtcggattttaaggaggctcacgccatgggcattgagtttaagcgttcaccgcgacccaccctgggcgttgagtgggaaattgcacttgttgatccagaaacacgtgatctagccccgcgcgctgcagaaatactagagattgtggccaagaaccaccctgaggtgcacctcgagcgcgaattcctccaaaacaccgtggagcttgtcaccggagtgtgcgacaccgtccccgaagcggtggcagagctttcccacgatctagatgcgctgaaagaagcagcggattctctcgggcttcggttgtggacctctggatcccacccattttcggatttccgcgaaaacccagtatctgaaaaaggctcctacgacgagatcatcgcgcgcacccaatactggggaaaccagatgttgatttggggcattcacgtccacgtgggcatcagccatgaagatcgcgtgtggccgatcatcaatgcgctgctgacaaattacccacatctgttggcactttctgcaagctctccagcatgggacggacttgataccggttatgcctccaaccggacgatgctctaccaacagctgcctacagccggactgccataccaattccaaagctgggatgaatggtgcagctacatggcggatcaagataaatccggtgtcatcaaccacaccggatccatgcactttgatatccgccccgcatccaaatggggaaccatcgaagtccgcgtggccgattctacctccaacctgcgggaactgtctgccatcgtggcgttgacccactgtctcgtggtgcactacgaccgcatgatcgacgctggcgaagagcttccctccctgcaacaatggcacgtttcggaaaataaatggcgcgcggctaggtatggtctggatgccgaaatcatcatttccagagacaccgatgaagcgatggttcaagacgaactccgccgactagtagcgcaattgatgcctctagccaacgaactcggctgcgctcgtgagcttgaacttgtgttggaaatcctggaacgtggtggtggatacgaacgccaacgcagagtgtttaaagaaactggcagttggaaagctgcagttgatttagcctgcgacgaactcaacgacctcaaagcactggactaaatagctatggtggaatccca

SEQ ID NO: 212 - protein, 376 aa, Corynebacterium glutamicum
MGIEFKRSPRPTLGVEWEIALVDPETRDLAPRAAEILEIVAKNHPEVHLEREFLQNTVELVTGVCDTVPEAVAELSHDLDALKEAADSLGLRLWTSGSHPFSDFRENPVSEKGSYDEIIARTQYWGNQMLIWGIHVHVGISHEDRVWPIINALLTNYPHLLALSASSPAWDGLDTGYASNRTMLYQQLPTAGLPYQFQSWDEWCSYMADQDKSGVINHTGSMHFDIRPASKWGTIEVRVADSTSNLRELSAIVALTHCLVVHYDRMIDAGEELPSLQQWHVSENKWRAARYGLDAEIIISRDTDEAMVQDELRRLVAQLMPLANELGCARELELVLEILERGGGYERQRRVFKETGSWKAAVDLACDELNDLKALD

SEQ ID NO: 213 - DNA, 687 bp, Corynebacterium glutamicum
  CDS (101)..(664): RXA01450
atgtgaagcgaaatttcacctttttggaggcagtcgacaatgctctgggcactgttttgtgcctcctgattaggttcttacccaacgattgctaggatatgtgcctgtgacccttactcttggaatcgtcggcctgcccaacgttggcaagtccaccctgttcaacgccctgactcgcaatgacgtgctcgcagcgaactacccgttcgccaccatcgagccaaacgtgggccttgtcgagcttccagacgctcgccttgaacgcctttctgaaatcttcggctctgagcgcatcctgccagcaaccgtgtctttcgttgacatcgccggaatcgttaagggagcttccgaaggcgaaggaatgggcaacgctttccttgccaacatccgcgaagcagacgctatctgtcaggttgtgcgcgcattcgctgacgaaaacgtcattcacgtcgatggtgaagttaacccagcaaccgatatctctgtgatcaacaccgagctgatcctcgccgacctgcagaccgtggaaaaagcactcccacgcctcgaaaaggatgcacgcaaagacaagggacttggcgaagtcgtagatgagaccaaaaaagcccttgcgatcttgagcgatgaccgcaccttgtttctctgcagcaaaagctggcgacattgatctggccctcctgcgcgatc

SEQ ID NO: 214 - protein, 188 aa, Corynebacterium glutamicum
VPVTLTLGIVGLPNVGKSTLFNALTRNDVLAANYPFATIEPNVGLVELPDARLERLSEIFGSERILPATVSFVDIAGIVKGASEGEGMGNAFLANIREADAICQVVRAFADENVIHVDGEVNPATDISVINTELILADLQTVEKALPRLEKDARKDKGLGEVVDETKKALAILSDDRTLFLCSKSWRH

SEQ ID NO: 215 - DNA, 690 bp, Corynebacterium glutamicum
  CDS (101)..(667): RXA01451
gtggaaaaagcactcccacgcctcgaaaaggatgcacgcaaagacaagggacttggcgaagtcgtagatgagaccaaaaaagcccttgcgatcttgagcgatgaccgcaccttgtttctctgcagcaaaagctggcgacattgatctggccctcctgcgcgatctccacctgatgacagcaaagcctttcctctacgtcttcaactccgacgaaaaagtgctcaccgacgacgccaagaaggacgaactccgcgcactagtcgcgccagcagactgcgtattccttgacgcacaaactgaaaccgaacttcttgaactcgaagaagacgaagcagcagaactcctcgaagctgtaggccaaacggaaccaggcctacactccctcgcacgtgcaggatttgaaaccctcggactacagacctacctcaccgcgggtcctaaggaatcacgcgcctggaccatccacaagggcgacaccgctccacaggcagcaggcgttatccattctgacttcgaacgcggcttcatcaaggctgaaatcgtctccttcgaagatcttgacgctgctggttccatggcggaagccaaggcccagggcaaagtccgccaagaaggtaaggactacgtgatggtcgatggcgacgttgtggagttccggtttaacgtctagcgttattgacgctcctcgtt

SEQ ID NO: 216 - protein, 189 aa, Corynebacterium glutamicum
MTAPCFSAAKAGDIDLALLRDLHLMTAKPFLYVFNSDEKVLTDDAKKDELRALVAPADCVFLDAQTETELLELEEDEAAELLEAVGQTEPGLHSLARAGFETLGLQTYLTAGPKESRAWTIHKGDTAPQAAGVIHSDFERGFIKAEIVSFEDLDAAGSMAEAKAQGKVRQEGKDYVMVDGDVVEFRFNV

SEQ ID NO: 217 - DNA, 1626 bp, Corynebacterium glutamicum
  CDS (101)..(1603): RXA02376
actggtaggatcgaagaaccttggcgcccacacatccccctttatttttctacttatacgtcggcgcccgttttatcccgatcaggagtgacaccgttttatgaaccgatttattgaccgcgttgtgctacacctcgccgcaggtgacggcggcaatggttgtgtctcggtgcaccgcgaaaaattcaagccacttggtggaccagacggcggcaacggcggccacggtggagacatcatcttggaagtcaccgcacaggtccacaccctgcttgacttccacttccacccacacgtgaaggccgagcgcggcgctaacggcgctggcgatcatcgcaacggtgcccgaggcaaggaccttgtcttggaagttccaccaggaactgtcgtgcttaatgaaaagggcgagactctggcagacctgaccagcgtgggcatgaagttcatcgctgctgctggcggtaacggcggtttgggtaacgcagcgcttgcctccaaggctcgtaaggccccaggcttcgccctgatcggtgagccaggcgaggcccacgacttgattcttgaactcaaatccatggcagatgtgggattggtgggcttcccatcagccggcaaatcatcactgatttctgtgatgtctgcagcaaagccaaagatcggtgattacccattcaccaccctgcagccaaacctcggcgtagttaacgttggtcatgagactttcaccatggcagacgtgcctggtttgatccctggtgcttctgagggcaagggcttgggtctggatttcttgcgccacattgagcgcacctccgtgctggttcacgttgtcgataccgcaacgatggatccaggccgcgatccgatctctgatattgaggctttggaagcagaacttgccgcctaccagtcggctttggatgaagacaccggacttggtgacttgagccagcgccctcgccttgttgtgttgaacaaggctgatgtccctgaggctgaagagcttgctgagttcctcaaagaagatattgagaagcaattcggatggcccgtgttcattatctccgcagtggcacgcaagggcttggatcctttgaagtacaagctgctggaaatcgtccaggatgcccgaaagaagcgtccaaaggagaaggctgagtctgtcatcattaagcctaaggctgttgatcaccgcactaaggggcagttccagatcaagcctgacccagaggttcagggcggattcatcatcaccggcgaaaagccagagcgctggattttgcagaccgactttgaaaacgacgaagcagttggctacctggctgaccgtctggccaagttgggcattgaggacgggcttcgtaaggcaggagcacatgtgggtgcaaacgtcaccatcggaggcatttccttcgagtgggagccaatgaccaccgctggcgacgatccagtccttaccggacgtggcaccgatgtgcgccttgaacagacctctcgtatctctgctgcagagcgtaaacgcgcatctcaggtacgtcgtggcctcatcgatgagttggattatggcgaggaccaagaggcttcccgcgaacgctgggaaggataaaaccgagcacttttcaggtc

SEQ ID NO: 218 - protein, 501 aa, Corynebacterium glutamicum
MNRFIDRVVLHLAAGDGGNGCVSVHREKFKPLGGPDGGNGGHGGDIILEVTAQVHTLLDFHFHPHVKAERGANGAGDHRNGARGKDLVLEVPPGTVVLNEKGETLADLTSVGMKFIAAAGGNGGLGNAALASKARKAPGFALIGEPGEAHDLILELKSMADVGLVGFPSAGKSSLISVMSAAKPKIGDYPFTTLQPNLGVVNVGHETFTMADVPGLIPGASEGKGLGLDFLRHIERTSVLVHVVDTATMDPGRDPISDIEALEAELAAYQSALDEDTGLGDLSQRPRLVVLNKADVPEAEELAEFLKEDIEKQFGWPVFIISAVARKGLDPLKYKLLEIVQDARKKRPKEKAESVIIKPKAVDHRTKGQFQIKPDPEVQGGFIITGEKPERWILQTDFENDEAVGYLADRLAKLGIEDGLRKAGAHVGANVTIGGISFEWEPMTTAGDDPVLTGRGTDVRLEQTSRISAAERKRASQVRRGLIDELDYGEDQEASRERWEG

SEQ ID NO: 219 - DNA, 605 bp, Corynebacterium glutamicum
  CDS (1)..(582): RXA01065
atccttgaagcagtccgcaaggtatcgcctaaaactcctatcctcggcatcatcaccaaagcagacagcgtctcacgtgacttggttgcggcccaactgatggctgtccatgagctgctcggcggaaacagcgaggtagtcccagtgtcttccacctcgggggaaaacgtcgaaacgcttattaaggtcatgaccgacctgctgcctgaaggccccaagttctacccggatgatcacatcaccgatgaggacaccaacacccgcatcgcggaagccatccgcgaagcagcactgtctggcttgaagaacgaactgccgcactccgtcgcagttgaggttgatgaaatcctgccagacccagaacgcaacggtgtcctggctgtgcacgccatcatctacgtcgagcgtgttggtcagaaagacatcatcgtcggacacaagggacagcgcctggggcgcatcatccacacctcacgccaagacatcatcaagatcctcggccaaaacgtattccttgacctgcgcatcaaggtgctgaagaactggcaatccgatccaaaggctttgaaccgcctgggcttctagctttaagggggtgagttcat

SEQ ID NO: 220 - protein, 194 aa, Corynebacterium glutamicum
ILEAVRKVSPKTPILGIITKADSVSRDLVAAQLMAVHELLGGNSEVVPVSSTSGENVETLIKVMTDLLPEGPKFYPDDHITDEDTNTRIAEAIREAALSGLKNELPHSVAVEVDEILPDPERNGVLAVHAIIYVERVGQKDIIVGHKGQRLGRIIHTSRQDIIKILGQNVFLDLRIKVLKNWQSDPKALNRLGF

SEQ ID NO: 221 - DNA, 1650 bp, Corynebacterium glutamicum
  CDS (101)..(1627): RXA02232
aatagagcgctcaatttaggtgtttatggtggcttgatcgctcacggcgttgcccgacacctagccttggcgacagcagacgtgaaacaatagataaacaatggatgaaaagaaaaacttaagtcatgatgaacttctcgctcaggccttccgcggtcacaaaaataccgtgcgcccaggatctgacgagacctcaggttttgatctcagtggttttatccgagctgaagaaccatcaactggtgatctcgacctagaggcccgcgatgcccaacgtcgccgggacaccgaaatccacgctgatgaagcagcagatggctacgaggttgagtaccgaaagctgcgacttgagcgcgttatcttagtgggcgtgtggaccgaaggtaccaccgcagaaattgacgccagccttgcggaacttgcagcgttggctgataccgccggcgctgaggttattgaaacgctgtaccaaaagcgcgataaaccagatcctggaacctacattggttccggcaaggttcgggagttaaaggagatcatcgaagccactagtgcagataccgtggtgtgcgatggtgaacttagcccttcccagctcgtggcattagagcgcgaacttgatatcaaggtcattgaccgcaccatgctgattctggatatcttcgcccagcacgctaaatcgcgcgaaggtaaagcccaagtcgcgttggcgcagatggaatacctgattagccgtgtgcgtggttggggtggaaacctctccaggcaggccggtggtcgtgcaggttctaatggtggtgtgggtctgcgtggtccaggtgaaaccaaaattgaagcagaccgccgtcgtcttcgatcggatatggctcgcctgcgcagggaactttcggggctggatacgtcgagaagcattaaaagagcgcaacgcgcagcctccctggtgccgcagatcgccatcgctggctacacgaacgccggcaaatcttcgctgattaacgcgatgaccggcgcgggtgtgctggtggagaacgcgctgttcgccacgcttgatccaacaaccagaaaagccgagcttgccgacggccgacacgtcgtgttcacggacaccgtcggctttgtgcgacacctgccgacctctctggttgaggcgttcaaatctacgctggaagaagtcgtggaggcggacctcatgctgcacgtggtggatggatccgatccgttcccgctgaagcagatcgacgctgtgaacaccgtgattagcgatattgtgcgatccaccggtgcggtgccaccaccagagatcatcgtggtgaacaaaattgaccaagctgatccgctgacgctggcagaactacgccacgccgtcgacgatgtggtgtttgtctctgcgctgacaggggagggaattaaggagctggaagctcgcatcgaactattcctcaactccagggacgcgcacctactgctgaaaatcccgttcacccgtggcgatattgtgtcccgcctgcaccagcatggcaccgttctcagcgaagactacgccgaagacggcaccttgatggatgtgcgtatccccacccaattggcccaagagctgcagagttacgttgtagaacccacctctgcctaactgtcgatttcccaagagcc

SEQ ID NO: 222 - protein, 509 aa, Corynebacterium glutamicum
MDEKKNLSHDELLAQAFRGHKNTVRPGSDETSGFDLSGFIRAEEPSTGDLDLEARDAQRRRDTEIHADEAADGYEVEYRKLRLERVILVGVWTEGTTAEIDASLAELAALADTAGAEVIETLYQKRDKPDPGTYIGSGKVRELKEIIEATSADTVVCDGELSPSQLVALERELDIKVIDRTMLILDIFAQHAKSREGKAQVALAQMEYLISRVRGWGGNLSRQAGGRAGSNGGVGLRGPGETKIEADRRRLRSDMARLRRELSGLDTSRSIKRAQRAASLVPQIAIAGYTNAGKSSLINAMTGAGVLVENALFATLDPTTRKAELADGRHVVFTDTVGFVRHLPTSLVEAFKSTLEEVVEADLMLHVVDGSDPFPLKQIDAVNTVISDIVRSTGAVPPPEIIVVNKIDQADPLTLAELRHAVDDVVFVSALTGEGIKELEARIELFLNSRDAHLLLKIPFTRGDIVSRLHQHGTVLSEDYAEDGTLMDVRIPTQLAQELQSYVVEPTSA

SEQ ID NO: 223 - DNA, 194 bp, Corynebacterium glutamicum
  CDS (1)..(171): RXA00848
accactgtcaccttggctaaggctcggtctctctccttggatgaggcactggagttctgtggcgtcgacgagtgcgtcgaggttacccctgatgttctgcgcatccgcaaggtcatcctgaacgctactgagcgtggccgtgcacgttcccgtgcgaagagcctgaacaagtaattctcttttagttaagagtt

SEQ ID NO: 224 - protein, 57 aa, Corynebacterium glutamicum
TTVTLAKARSLSLDEALEFCGVDECVEVTPDVLRIRKVILNATERGRARSRAKSLNK

SEQ ID NO: 225 - DNA, 469 bp, Corynebacterium glutamicum
  CDS (101)..(469): FRXA00839
cacaatgtgcggaacgggcgataatgcgagtacagtgataccgttctaaaacaatggactcgttttacaagtcctccatacttctttatccggcaggagaatgcccccagtgacccacccagagtttcgtaacgtagcgattgtcgcgcacgttgaccacggaaagaccacactcgttaatgccatgcttgaacagtctggcgtattcagtgaccacggtgaagtagccgaccgtgtgatggactccggtgacctggaaaaggaaaagggcatcaccatccttgccaagaacaccgcgattcgtcgtaaaggcgctggcaaggacggcaatgacctgattatcaacgtcattgacaccccaggccacgctgacttcggtggcgaagttgagcgcgcactgtccatggttgacggcgttgtccttctggttgacgcatctgaaggcccactgcctcagacccgattcgtg

SEQ ID NO: 226 - protein, 123 aa, Corynebacterium glutamicum
MPPVTHPEFRNVAIVAHVDHGKTTLVNAMLEQSGVFSDHGEVADRVMDSGDLEKEKGITILAKNTAIRRKGAGKDGNDLIINVIDTPGHADFGGEVERALSMVDGVVLLVDASEGPLPQTRFV

SEQ ID NO: 227 - DNA, 903 bp, Corynebacterium glutamicum
  CDS (1)..(903): FRXA00845
tcctccttccttggtcgtatcggcctggttcgcgttcacgcaggtaccttgcgtaagggccagcaggttgcatggattcactacgatgaagaaggtaaccagcacaccaagaccgctaagatcgcagagcttctggctaccgttggcgttgcccgcgttcctgctaccgaagttgttgcaggtgacatcgctgctatctccggcatcgaagacatcatgattggcgataccctcgcggatcctgagaacccagttgcactgcctcgcatcaccgttgatgagccagcactgtccatgaccatcggtgtgaacacctcaccaatggctggtcgtggcggcggagacaagctgaccgcacgtgtggtcaaggctcgtcttgagaacgaactgatcggtaacgtgtccctgaaggtcaacccaactgagcgcccagatacctgggaagttcagggtcgtggcgaaatggctctgtccatcctcgttgagaccatgcgtcgcgaaggcttcgagctcaccgttggtaagccacaggttgttacccagaccatcgacggcaagctgcacgagccttacgagatcatcgtcatcgacgttccttccgagtaccagggcaacgtgacccagctgctggctacccgcaagggcctcatgcagtccatgtccaccaccccaggttccgactggatccgcatggaattccgtattcctgctcgtggcctgattggtttccgtacccagttcatgactgaaacccgtggtaccggtatcgctaactcctactctgacggcatggatgtttgggctggcgaaatcaagggccgcgcacacggttccttggttgctgaccgttccggccagatcaccgcttacgctctgacccagctggcagaccgtggtagcttc

SEQ ID NO: 228 - protein, 301 aa, Corynebacterium glutamicum
SSFLGRIGLVRVHAGTLRKGQQVAWIHYDEEGNQHTKTAKIAELLATVGVARVPATEVVAGDIAAISGIEDIMIGDTLADPENPVALPRITVDEPALSMTIGVNTSPMAGRGGGDKLTARVVKARLENELIGNVSLKVNPTERPDTWEVQGRGEMALSILVETMRREGFELTVGKPQVVTQTIDGKLHEPYEIIVIDVPSEYQGNVTQLLATRKGLMQSMSTTPGSDWIRMEFRIPARGLIGFRTQFMTETRGTGIANSYSDGMDVWAGEIKGRAHGSLVADRSGQITAYALTQLADRGSF

SEQ ID NO: 229 - DNA, 581 bp, Corynebacterium glutamicum
  CDS (19)..(558): RXA02365
gaatttgtgggaccgacaatggagctgtgccagactaagcgtggtcagatgggtggcatggactacctttcggaggaccgcgtggagctgcgctacaccatgcctttgggtgagatcatctttgacttcttcgatatgttgaagtctcgcaccaagggttacgcttcgctgaactacgaggaagctggcgagcagactgccgacctggtcaaggtagatatcttgctccaaggtgaacctgtggatgcattctctgcgatcgtgcaccgcgataatgcgcagtggtacggaaacaagatgactgtgaagctgaaggaactgatccctcgccagcagttcgaagttcctgtgcaggcagccattggttccaaggttatcgctcgtgaaaacattcgtgcactgcgcaaggacgtgttggcgaagtgttacggtggcgatatttcccgtaagcgcaagcttctggaaaagcagaaggctggtaagaagcgcatgaagaacatcggttcggtcgaggttcctcaggaagcattcgtagcagcactgtctaccgacgaggcataaaaaactttagcctcttttag

SEQ ID NO: 230 - protein, 180 aa, Corynebacterium glutamicum
MELCQTKRGQMGGMDYLSEDRVELRYTMPLGEIIFDFFDMLKSRTKGYASLNYEEAGEQTADLVKVDILLQGEPVDAFSAIVHRDNAQWYGNKMTVKLKELIPRQQFEVPVQAAIGSKVIARENIRALRKDVLAKCYGGDISRKRKLLEKQKAGKKRMKNIGSVEVPQEAFVAALSTDEA

SEQ ID NO: 231 - DNA, 1360 bp, Corynebacterium glutamicum
  CDS (101)..(1360): FRXA02392
aaaactgctgatggtttggcagttcagggctgtttaactgtttgggtttgctcaggtagagtaggacaccgttatttaattgaagggacccctgacgcatatggcagagaaatttgcagaaacaacatttacggatccagccaggattcgtaacttctgcatcattgcccacattgaccacggtaaatctacgctcgctgaccgtatcctgcagctgtctaacgttgtggatgcccgcgatatgcgtgatcagtacctggacaacatggacatcgaacgtgaacgtggcattaccattaaggctcagaacgttcgcctgccatggattcctcgcagtggtgagtacgagggccagcagatcgtcatgcagatgatcgatacgccaggccacgtggacttcacctatgaagtgtctcgggcgcttgaagcgtgtgaaggcgcgattttgcttgttgatgcagcgcagggcattgaagcccagaccttggcaaacttgtatttggctatggaaaacgatcttgagatcatccctgtgctgaacaagattgaccttccagcggcggatccagacaagtacgcgttggagatcgccaacattgtgggttgtgaacctgaagatgtgttgcgcgtgtccggtaaaactggcatgggtgtccctgagcttctggataaggtcgttgaacttatcccagcacctacctctgaatttgaggaagacgccccagctcgtgcgatgattttcgactctgtctatgacacctaccgcggcgtggttacctacatccgcatgatggacggcaagctgacacctcgccaaaagatcaagatgatgtccaccggcgccacccacgagttgctggaaatcggcatcgtgagccccacccctaaaaagtgtgtgggtcttggacctggcgaggttggttacctgatcaccggtgtgaaggacgtgcgccaatctaaggtgggcgataccgtcacgtgggcaattcatggagctgagcagccactgcgcggttaccaggaaccaacaccgatggtttactcgggcttgttcccgatttcccaagcggatttccccgacttgcgcgatgcgcttgaaaagctgcagcttaacgacgcctccctcacgtacgaacccgaaacgtccgtagcactgggctttggtttccgatgtggcttcctcggactgctgcacatggaaatcacccgtgaccgactcgaacgtgagtttggccttgatctgatttctaccgcgccatctgttaactaccgcgttattgatgaggcgggcaaggaattccgcgtccacaacccatctgactggcctggcggaaagctcagtgaagtttacgagcccatc

SEQ ID NO: 232 - protein, 420 aa, Corynebacterium glutamicum
MAEKFAETTFTDPARIRNFCIIAHIDHGKSTLADRILQLSNVVDARDMRDQYLDNMDIERERGITIKAQNVRLPWIPRSGEYEGQQIVMQMIDTPGHVDFTYEVSRALEACEGAILLVDAAQGIEAQTLANLYLAMENDLEIIPVLNKIDLPAADPDKYALEIANIVGCEPEDVLRVSGKTGMGVPELLDKVVELIPAPTSEFEEDAPARAMIFDSVYDTYRGVVTYIRMMDGKLTPRQKIKMMSTGATHELLEIGIVSPTPKKCVGLGPGEVGYLITGVKDVRQSKVGDTVTWAIHGAEQPLRGYQEPTPMVYSGLFPISQADFPDLRDALEKLQLNDASLTYEPETSVALGFGFRCGFLGLLHMEITRDRLEREFGLDLISTAPSVNYRVIDEAGKEFRVHNPSDWPGGKLSEVYEPI

SEQ ID NO: 233 - DNA, 2205 bp, Corynebacterium glutamicum
  CDS (101)..(2182): RXA01573
agccccagctcaccgaattctccattcgttttaattgcttcgttaattaaaacgccatataaaaaccggcgcattgccggtatttttccaggagaatttaatgaagaggctttcccgtgcagccctcgcagtggtcgccaccaccgcagttagcttcagcgcactcgcagttccagctttcgcagacgaagcaagcaatgttgagctcaacatcctcggtgtcaccgacttccacggacacatcgagcagaaggctgttaaagatgataagggagtaatcaccggttactcagaaatgggtgccagtggcgttgcctgctacgtcgacgctgaacgcgcggacaacccaaacacccgcttcatcaccgttggtgacaacattggtggatccccattcgtgtcctccatcctgaaggatgagccaaccttgcaagccctcagcgccatcggtgttgacgcatccgcactgggcaatcacgaattcgaccagggctactcagacctggtgaaccgcgtttccctcgacggctccggcagcgcaaagttcccatacctcggcgcaaacgttgaaggtggcaccccagcacctgcaaagtctgaaatcatcgagatggacggcgtcaagatcgcttacgtcggcgcagtaaccgaggagaccgcaaccttggtctccccagcaggcatcgaaggcatcaccttcaccggcgacatcgacgctatcaacgcagaagcagatcgcgtcattgaggcaggcgaagcagacgtagtcatcgcattgatccacgctgaagccgctccaaccgatctattctccaacaacgttgacgttgtattctccggacacacccacttcgactacgttgctgaaggcgaagcacgtggcgacaagcagccactcgttgtcatccagggccacgaatacggcaaggtcatctccgacgtggagatctcctacgaccgcgaagcaggcaagatcaccaacattgaggcgaagaatgtctctgctactgacgttgtggaaaactgtgagactccaaacacagcagtcgacgcaatcgttgcagctgctgttgaggccgctgaagaagcaggtaatgaagttgttgcaaccattgacaacggcttctaccgtggggcggatgaagagggtacgaccggctccaaccgtggtgttgagtcttccctgagcaacctcatcgcagaagctggactgtgggcagtcaacgacgcgaccatcctgaacgctgacatcggcatcatgaacgcaggcggcgtgcgtgcggacctcgaagcaggcgaagttaccttcgcagatgcatacgcaacccagaacttctccaacacctacggcgtacgtgaagtgtctggtgcgcagttcaaagaagcactggaacagcagtggaaggaaaccggcgaccgcccacgtctggcattgggactgtccagcaacgtccagtactcctacgacgagacccgcgaatacggcgaccgcatcacccacatcaccttcaacggtgagccaatggatatgaaggagacctaccgcgtcacaggatcatccttcctgctcgcaggtggcgactccttcactgcattcgctgaaggcggcccaatcgctgaaaccggcatggttgacattgacctgttcaacaactacatcgcagctcacccagatgcaccaattcgtgcaaatcagagctcagtaggcatcgccctttccggcccggcagttgcagaagacggaactttggtccctggtgaagagctgaccgtcgatctttcttccctctcctacaccggacctgaagctaagccaaccaccgttgaggtgaccgttggtactgagaagaagactgcggacgtcgataacaccatcgttcctcagtttgacagcaccggcaaggcaactgtcaccctgactgttcctgagggagctacctctgtcaagatcgcaactgacaatggcactacctttgaactgccagtaaccgtaaacggtgaaggcaacaatgatgacgatgatgataaggagcagcagtcctccggatcctccgacgccggttcccttgtagcagttctcggtgttcttggagcactcggtggcctggtggcgttcttcctgaactctgcgcagggcgcaccattcttggctcagcttcaggctatgtttgcgcagttcatgtaataacttgtagtaaataaatc

SEQ ID NO: 234 - protein, 694 aa, Corynebacterium glutamicum
MKRLSRAALAVVATTAVSFSALAVPAFADEASNVELNILGVTDFHGHIEQKAVKDDKGVITGYSEMGASGVACYVDAERADNPNTRFITVGDNIGGSPFVSSILKDEPTLQALSAIGVDASALGNHEFDQGYSDLVNRVSLDGSGSAKFPYLGANVEGGTPAPAKSEIIEMDGVKIAYVGAVTEETATLVSPAGIEGITFTGDIDAINAEADRVIEAGEADVVIALIHAEAAPTDLFSNNVDVVFSGHTHFDYVAEGEARGDKQPLVVIQGHEYGKVISDVEISYDREAGKITNIEAKNVSATDVVENCETPNTAVDAIVAAAVEAAEEAGNEVVATIDNGFYRGADEEGTTGSNRGVESSLSNLIAEAGLWAVNDATILNADIGIMNAGGVRADLEAGEVTFADAYATQNFSNTYGVREVSGAQFKEALEQQWKETGDRPRLALGLSSNVQYSYDETREYGDRITHITFNGEPMDMKETYRVTGSSFLLAGGDSFTAFAEGGPIAETGMVDIDLFNNYIAAHPDAPIRANQSSVGIALSGPAVAEDGTLVPGEELTVDLSSLSYTGPEAKPTTVEVTVGTEKKTADVDNTIVPQFDSTGKATVTLTVPEGATSVKIATDNGTTFELPVTVNGEGNNDDDDDKEQQSSGSSDAGSLVAVLGVLGALGGLVAFFLNSAQGAPFLAQLQAMFAQFM

SEQ ID NO: 235 - DNA, 1116 bp, Corynebacterium glutamicum
  CDS (101)..(1093): RXN01445
gagtctcgaatgtataacgagtttgttcctaataactttatcattaactatgcctgcaataggcttgggaaattttggcatccaggtaatcgcgctgtcaatgatcccacttattaatgtacgttttcccgttgccgccttacctctcgcattagtggcgactgtatggcttaatgcttgggcagaccatcttctcctaactggttttattgtttatcttgctgtggaatacgcaacaagccgtgggcgcttcgctctcgcattgattttgggagttgaatggatcttaattgcttatggggtagctttggaaaggcctcttgaggctaaagactctccatctctcattaccgaaattttgctcatacttgtagcagctggcacaggggcaggtcggtggaaaattttgagtgaacgcaagcaacgtgcaattactcagcaggaaatcatcaaaaaaatccgtactgatatagcgcactatttgcatgacagtatggcaagatcgttggcaataatgatagttcaatcaaagctgactgaactagagcctgatccaaaaaagattcaagaaaaactaaacagtattgccaaaattggacaagaggcagtggctgatttgcatcaattagttagacacctcgtggtcgaggagtctgctgaaaaagccacagcgtttggagcatgggctgcagtttctattcatgacacggttaattctgccattcagttattagtagatgcaggacatgtcgtttcctttgacagtagaaaaaagaactataagctggaccatattgctgaaacggcgtttgctttagccttcaatgaggcagtctgtaatgcaattaaacattctccgcccaaggcaaacgttactattcgcataacagaaaaagcacagtctcttcagattctagtaatgaatcctattggagattggcatgcaaatggggagtccgcaattccaggtgtgggcattggcgtagaaagcttaaccagaaggatacgtaatattaaaggacaggtctgtgtgacttcactgcaaggatactggaaagtagttatttcactacctttgaaatgtgaggattcttaaattgtctctatttgttgaac

SEQ ID NO: 236 - protein, 331 aa, Corynebacterium glutamicum
MIPLINVRFPVAALPLALVATVWLNAWADHLLLTGFIVYLAVEYATSRGRFALALILGVEWILIAYGVALERPLEAKDSPSLITEILLILVAAGTGAGRWKILSERKQRAITQQEIIKKIRTDIAHYLHDSMARSLAIMIVQSKLTELEPDPKKIQEKLNSIAKIGQEAVADLHQLVRHLVVEESAEKATAFGAWAAVSIHDTVNSAIQLLVDAGHVVSFDSRKKNYKLDHIAETAFALAFNEAVCNAIKHSPPKANVTIRITEKAQSLQILVMNPIGDWHANGESAIPGVGIGVESLTRRIRNIKGQVCVTSLQGYWKVVISLPLKCEDS

SEQ ID NO: 237 - DNA, 1254 bp, Corynebacterium glutamicum
  CDS (101)..(1231): RXN03143
ttcgttgcgcgggggcattttttaatcgggctctggtcgattcttgcagtacgaccaaagtcggattcgcgttcatacttagttgatctatcgtggtggcgtgaaaactagccaagcgaccatcgcccgaattgagagagttctcatttggggattgcatttactcattgccgttttgttggtgttggtgtgttggcgtgccagccattggggtgtgtgggtgctcgcttttggctatggcgtggtttatgtggcgggtgtggtcccgaattcgccgtttaagaatcaccctatggcgtggtttcttgtgctgagtttgttgtgggcgagcctgatttgggatggaccggagcctgcgtatttggtgtttccgatgtttttcctcgcagtgttgatcacgacaccgctgaaatccgcgatcatcattgcaatactgacggcgatcgcggtggttacgttggctatgcacctggggttttctgttggcgttgtcaccggtccgatccttggcgcgttggtggcgtgggtaatgggtacgtgttttcagttattggcacaagccttaaaggagcttgtcgacgcacgtgcgtcggcgatccgggcgtcgaaaagcgctggcgagcaggcagaacgagcccgcatagcgggcgaaatacatgacactgtggcgcaggggttgtcctcgattcagatgttgttgcatgcggcggaaaaacgggtggatgatccgcaggcgttaagccatatacggttggccaggcaaacgacagctgataatttggcggagaccaggcagatcattgctgcgctgcaaccgactccactcattggggcggatctgccggtggcgttggccagactgtcgtcgaccaccccgatgggacagaacatcacgtttgaagtcgacggatccccacgggtattacctgatgcgatggaggcagagatcgtacgaattgcccaaacgctgctgggaaatgtggtgcggcatgcacaggcagattctgcaaaaatgaccctgacatatcaagatgatcaaatacttctagatgtcatcgataatgggcagggatttgatgtggcagaagtgatccgtaaaaaatccattggactgcccacagcgcaacgccgggctgaagggctgggcggaacaataattattgaatctacaatcggatcgggaactggaatttccgcccgttttccctatccacaaaaggaccaagataagtgatccgtattctgttggctgat

SEQ ID NO: 238 - protein, 377 aa, Corynebacterium glutamicum
VKTSQATIARIERVLIWGLHLLIAVLLVLVCWRASHWGVWVLAFGYGVVYVAGVVPNSPFKNHPMAWFLVLSLLWASLIWDGPEPAYLVFPMFFLAVLITTPLKSAIIIAILTAIAVVTLAMHLGFSVGVVTGPILGALVAWVMGTCFQLLAQALKELVDARASAIRASKSAGEQAERARIAGEIHDTVAQGLSSIQMLLHAAEKRVDDPQALSHIRLARQTTADNLAETRQIIAALQPTPLIGADLPVALARLSSTTPMGQNITFEVDGSPRVLPDAMEAEIVRIAQTLLGNVVRHAQADSAKMTLTYQDDQILLDVIDNGQGFDVAEVIRKKSIGLPTAQRRAEGLGGTIIIESTIGSGTGISARFPYPQKDQDK

SEQ ID NO: 239 - DNA, 362 bp, Corynebacterium glutamicum
  CDS (1)..(339): RXN03071
atgctggcgccatggcagctccacaaagacgacgacatcgtcgcccgcaacgagcagatcaccgaagccttcgagcgcgacgtcgtcccatacgcggagcttttcgacgcctccggccagattccttcatcgcaggagttcttccgcgtgtcactcaccggacagtatcttccagacagtgaggttttgctgcgccttcgccccgtcgactccggcccagcattccaatcgttaacccccttcgaacttgaaaacggacagattgtcctcgtcaaccgtggttacgaatcatcagagggcacaatcgtcccagagatcgagcctgctccttcacaccagtaaccatcaccggattcgccgca

SEQ ID NO: 240 - protein, 113 aa, Corynebacterium glutamicum
MLAPWQLHKDDDIVARNEQITEAFERDVVPYAELFDASGQIPSSQEFFRVSLTGQYLPDSEVLLRLRPVDSGPAFQSLTPFELENGQIVLVNRGYESSEGTIVPEIEPAPSHQ

SEQ ID NO: 241 - DNA, 558 bp, Corynebacterium glutamicum
  CDS (101)..(535): RXN03072
atcagagggcacaatcgtcccagagatcgagcctgctccttcacaccagtaaccatcaccggattcgccgcaagaacgagggcctccaggttctgcacctatggaagacagcggctacacccaggtctacggaattaacaccgaacagatcagtgacgtcaccggccttgatcttggcaccgactacgtccaggtcgcagaaggcgaacctggtgttttgaacccaatgccactgcctcaaatggaccgcggtaaccacctctcatacggcttccagtggatcgccttcggcatcatggcacctttagggcttggatacttcatctgggctgaaatgcgcgaacgacgccgcgacaaagcagaacgcgaacagatggccgagctaaacactcttgaaccagtggtggaaacccctgaagttgttgaaactgcagaaccaaccatcaccccggctgcatccaaacgacgttcacgctacggcgatcaacaccgcaatcactacgagaagatctccaaacgagaccaagagcgcttctaagcccgtctcatttttgcacc

SEQ ID NO: 242 - protein, 145 aa, Corynebacterium glutamicum
MEDSGYTQVYGINTEQISDVTGLDLGTDYVQVAEGEPGVLNPMPLPQMDRGNHLSYGFQWIAFGIMAPLGLGYFIWAEMRERRRDKAEREQMAELNTLEPVVETPEVVETAEPTITPAASKRRSRYGDQHRNHYEKISKRDQERF

SEQ ID NO: 243 - DNA, 600 bp, Corynebacterium glutamicum
  CDS (101)..(577): RXN01773
ccctaaaaacaacgacagcaaagctgcgttcggatatattctcgaactgctgtagtgcatacgctacagcccgctaccaccgtaaaagcgagaacatatcatgactgttgatctctaccaggcacgcattccttttcagcgcgatggcgtgcgctttgatcatacgatgatcacccacattcaagccggcctgcatcttggtggctgccgcgcagcaggtttactgcctataccagcacatattgatcatattgtgcgcctgacagccgcagatttctatgacacccagtcagcaccgcagctgctcagcaacactgtgcttgatgtattggacaccaccactcaagacttgaaggcattgtggcctgttgcagaacatattgctacaaccattcctgaatctgagaacgtgcttatccactgccagatgggtatcaaccgctcagctgcactcatgacacgggtgttgatgttgcgcaacgattgcaccgccgatgaagcaattgcactgctgcgtgatcgacgctcaccgtttgtactgttcaatgagcattttgtggaacaacttcgagcactgtaagcgctcaaagacccattacc

SEQ ID NO: 244 - protein, 159 aa, Corynebacterium glutamicum
MTVDLYQARIPFQRDGVRFDHTMITHIQAGLHLGGCRAAGLLPIPAHIDHIVRLTAADFYDTQSAPQLLSNTVLDVLDTTTQDLKALWPVAEHIATTIPESENVLIHCQMGINRSAALMTRVLMLRNDCTADEAIALLRDRRSPFVLFNEHFVEQLRAL

SEQ ID NO: 245 - DNA, 1344 bp, Corynebacterium glutamicum
  CDS (101)..(1321): RXN03090
tcaattatcagtactatgacgatgactgggacgacgacgatgatgacttcgacgacgactgggacgacgactaactaacccctgaggcactttctatttcatggctaaatcaactcctttgattgcatcgctacgctggcgaattgtcctgtggatgacagcggttgttttcttgaccctagccagcgttgtgatcattacccgttcggtgctgctttcagaggtaaccaacaccgcgaactcggcagttgagcaggaaattgaggagtttcgtcgctttgcagccgaaggaattgatccaacaactgcgcagccttttgagtcaggtcatcgcctgatggaggtttacctgtcgaggcagattccggatgaaaatgaagccattgtcggcattttccccggagagctcattcaggttgattactcccagctcagtggcgcccatccgcttcctttggaacactccgatccgttgatttcggaaatccgacagaccacgctgaattctggagttttcagcgatcttgaacgcggaaccactcactggggaaaggtgaatttccaaactgcttccggtgaggccgatggtgagttcgttgtcgcattcttcgctgataatcttaaagaccaggtcaacggccagatccagattcttattttgatcggcacagggggtttgattgcctcaattctgattgcttggttgattgcgggccagatcattgccccgatccgcaaattgagttccgtgtccgcaaagatcagtaattcggatctcacctggcgcgtccctgtggagggtcgtgatgagattgcgcagctggccaggacttttaatgccatgttggatcgcatcgaaatcgcgtataacgatcagcgccagttcgttgatgatgccggccacgagctgcgcaccccgatcacagtggtgcgtggccagttagagcttctcgccaccaccccgccggaggaacaagcgcggtcgattgagctggccaccactgagttggatcgaatgtcgcgaatggtcaatgatctgctcaccctcgcagtcgccgattctggcaccttcatccacgcccaccccacggatgtcacggatttaacaatcgatatcgaagacaaagcccgcaccatcagcgaccgaattttgcttgtcgacgcccgcccgagggcctcgtcagcctcgacgagcagcgggtcaccgaggcagtgcttggagttgttcggcaatgcgttgcgctacagcgatgatgtggtggagttgggttcaggatttcaaggggtctggcccccaccgcatttttcgcatttgggttcgtgacaaaggaaacggtgttgata

SEQ ID NO: 246 - protein, 407 aa, Corynebacterium glutamicum
MAKSTPLIASLRWRIVLWMTAVVFLTLASVVIITRSVLLSEVTNTANSAVEQEIEEFRRFAAEGIDPTTAQPFESGHRLMEVYLSRQIPDENEAIVGIFPGELIQVDYSQLSGAHPLPLEHSDPLISEIRQTTLNSGVFSDLERGTTHWGKVNFQTASGEADGEFVVAFFADNLKDQVNGQIQILILIGTGGLIASILIAWLIAGQIIAPIRKLSSVSAKISNSDLTWRVPVEGRDEIAQLARTFNAMLDRIEIAYNDQRQFVDDAGHELRTPITVVRGQLELLATTPPEEQARSIELATTELDRMSRMVNDLLTLAVADSGTFIHAHPTDVTDLTIDIEDKARTISDRILLVDARPRASSASTSSGSPRQCLELFGNALRYSDDVVELGSGFQGVWPPPHFSHLGS

SEQ ID NO: 247 - DNA, 351 bp, Corynebacterium glutamicum
  CDS (101)..(328): RXN00617
tacagcgatgatgtggtggagttgggttcaggatttcaaggggtctggcccccaccgcatttttcgcatttgggttcgtgacaaaggaaacggtgttgatatggatgaacaagaagccctgttcgatcgcttctccagaggctcccaaaaaaattcacggcgtcccggtggcgctggcctgggattatccattgtcaaggcgatcggcgaagcccacgtcggccgagctttcgtcaattccacaccaggtctaggatccattttcggcctggaaatccccgcaccagaacaatcaaaggaatacacccatgagcaagatcctgctcgctgaagatgacgccggcatcgcag

SEQ ID NO: 248 - protein, 76 aa, Corynebacterium glutamicum
MDEQEALFDRFSRGSQKNSRRPGGAGLGLSIVKAIGEAHVGRAFVNSTPGLGSIFGLEIPAPEQSKEYTHEQDPAR

SEQ ID NO: 249 - DNA, 720 bp, Corynebacterium glutamicum
  CDS (101)..(697): RXN02990
gaagactaagcaccagttttaacaaagcagggacaatccacacacttaaaccatgatgtggcttgttcctgctttttcgtcaacgaagggcaacaacgcgatggatatccaagccgaaaagattgaaaagctcagaaaagcactcgacaactttgaacgcgctcatgcgcgaggcgaatcagacttctttgaccatgaaaaagaagaaaagaaagccaacgtacgcagacgtgccctgctgctgcttaaccaacgcgcacgatcagtcaacgaactaagcaccagacttaaagcactggagtttgaggaagacatcatcaatgaggtcattggcgatctcaccagatccaaactgcttgatgatgaagtttttgccactgagtgggttcggcaacgtgctgccaggcgaggaaaatcttcgcgtgcgctggaccgcgaactgcaggaaaaaggcgtcgacaagcaaacgcgtgctgcggcgcttgagcaaatcgaccaggccgatgagcgggacacggcgcgggcggtggccgtgaaaaaggcgcgctcagagaccaagattccgcaggaccgcgccgactacgacaaagcgcttcggcgcgtggttggtgcgctggcacggcggggatttccggctggaatgtccatggaccttgcgcgggaagcgctagacgcgcgaatcgaggatttgaaaaactaaaccccggatgggaatcatcc

SEQ ID NO: 250 - protein, 199 aa, Corynebacterium glutamicum
MDIQAEKIEKLRKALDNFERAHARGESDFFDHEKEEKKANVRRRALLLLNQRARSVNELSTRLKALEFEEDIINEVIGDLTRSKLLDDEVFATEWVRQRAARRGKSSRALDRELQEKGVDKQTRAAALEQIDQADERDTARAVAVKKARSETKIPQDRADYDKALRRVVGALARRGFPAGMSMDLAREALDARIEDLKN

SEQ ID NO: 251 - DNA, 341 bp, Corynebacterium glutamicum
  CDS (1)..(318): RXN03100
ctctacggccaggacaaagtgacctccgatccgatggaagctgcttacactagcctctacctctggaaagaaatggtagagaaggccgattcctttgatgtcgccgcaattcaagcagccgccgacggaaccacttttgatgcaccagaaggaaccgtggtggttggcggcgataaccaccacatctccaaaacaccgcgcatcggtcgaatccgcccggatggattgatcgacaccatttgggaaaccgattccccagttgatccggacccatacttgtcttcctatgactgggccaagaccaccgctgcgacttcctaagagataaaaatcatggacat

SEQ ID NO: 252 - protein, 106 aa, Corynebacterium glutamicum
LYGQDKVTSDPMEAAYTSLYLWKEMVEKADSFDVAAIQAAADGTTFDAPEGTVVVGGDNHHISKTPRIGRIRPDGLIDTIWETDSPVDPDPYLSSYDWAKTTAATS

SEQ ID NO: 253 - DNA, 525 bp, Corynebacterium glutamicum
  CDS (101)..(502): RXN00031
cacacatcgcctcgtcatccttagacacgccaaatcttcctggtccaccggagtactcgaccataaacgcccacttaatcaacgtgggcttcgcgatggcgtggcagctggccaatggctagctggcaacatcggcgaaattgatcatgtgctgtgttcagatgccacccgcacacaattaacgtgggaacgcgtccagcttggtggcgcaaccgccaaaggctctagcttccacaatgacatctatgaaaaccaagtgtctgaatttaaacatttaataacagggctcccagatgtagttggtaccgccctactcatcgggcactggccaggcgtggaagaactagcccattattttggcatccgcgatgaacatcccggttgggatcagatggaagaaaagtttcccaccagcgccattgcggtgttggaatttaacaccccttggtcaaaacttgagagaaactctgctcggttgacagattttgtcattccacggggttagttctgcttcaattgaacaat

SEQ ID NO: 254 - protein, 134 aa, Corynebacterium glutamicum
VAAGQWLAGNIGEIDHVLCSDATRTQLTWERVQLGGATAKGSSFHNDIYENQVSEFKHLITGLPDVVGTALLIGHWPGVEELAHYFGIRDEHPGWDQMEEKFPTSAIAVLEFNTPWSKLERNSARLTDFVIPRG

SEQ ID NO: 255 - DNA, 1422 bp, Corynebacterium glutamicum
  CDS (101)..(1399): RXN02758
atacatctcacccaattccccataactagacaattgcccagcaacgactgataagtctccaatgtcgtgttccgcgctcagacatgagacaattgttgccgtgactgaactcatccagaatgaatcccaagaaatcgctgagctggaagccggccagcaggttgcattgcgtgaaggttatcttcctgcggtgatcacagtgagcggtaaagaccgcccaggtgtgactgccgcgttctttagggtcttgtccgctaatcaggttcaggtcttggacgttgagcagtcaatgttccgtggctttttgaacttggcggcgtttgtgggtatcgcacctgagcgtgtcgagaccgtcaccacaggcctgactgacaccctcaaggtgcatggacagtccgtggtggtggagctgcaggaaactgtgcagtcgtcccgtcctcgttcttcccatgttgttgtggtgttgggtgatccggttgatgcgttggatatttcccgcattggtcagaccctggcggattacgatgccaacattgacaccattcgtggtatttcggattaccctgtgaccggcctggagctgaaggtgactgtgccggatgtcagccctggtggtggtgaagcgatgcgtaaggcgcttgctgctcttacctctgagctgaatgtggatattgcgattgagcgttctggtttgctgcgtcgttctaagcgtctggtgtgcttcgattgtgattccacgttgatcactggtgaggtcattgagatgctggcggctcacgcgggcaaggaagctgaagttgcggcagttactgagcgtgcgatgcgcggtgagctcgatttcgaggagtctctgcgtgagcgtgtgaaggcgttggctggtttggatgcgtcggtgatcgatgaggtcgctgccgctattgagctgacccctggtgcgcgcaccacgatccgtacgctgaaccgcatgggttaccagaccgctgttgtttccggtggtttcatccaggtgttggaaggtttggctgaggagttggagttggattatgtccgcgccaacactttggaaatcgttgatggcaagctgaccggcaacgtcaccggaaagatcgttgaccgcgctgcgaaggctgagttcctccgtgagttcgctgcggattctggcctgaagatgtaccagactgtcgctgtcggtgatggcgctaatgacatcgatatgctctccgctgcgggtctgggtgttgctttcaacgcgaagcctgcgctgaaggagattgcggatacttccgtgaaccacccattcctcgacgaggttttgcacatcatgggcatttcccgcgacgagatcgatctggcggatcaggaagacggcactttccaccgcgttccattgaccaatgcctaaagattcgtttctcgacgccc

SEQ ID NO: 256 - protein, 433 aa, Corynebacterium glutamicum
VTELIQNESQEIAELEAGQQVALREGYLPAVITVSGKDRPGVTAAFFRVLSANQVQVLDVEQSMFRGFLNLAAFVGIAPERVETVTTGLTDTLKVHGQSVVVELQETVQSSRPRSSHVVVVLGDPVDALDISRIGQTLADYDANIDTIRGISDYPVTGLELKVTVPDVSPGGGEAMRKALAALTSELNVDIAIERSGLLRRSKRLVCFDCDSTLITGEVIEMLAAHAGKEAEVAAVTERAMRGELDFEESLRERVKALAGLDASVIDEVAAAIELTPGARTTIRTLNRMGYQTAVVSGGFIQVLEGLAEELELDYVRANTLEIVDGKLTGNVTGKIVDRAAKAEFLREFAADSGLKMYQTVAVGDGANDIDMLSAAGLGVAFNAKPALKEIADTSVNHPFLDEVLHIMGISRDEIDLADQEDGTFHRVPLTNA

SEQ ID NO: 257 - DNA, 738 bp, Corynebacterium glutamicum
  CDS (101)..(715): RXN00978
tcctgggtagcatgggcttatgagcactgatagccaaaaccctgtaagaaaatcctgcgcacagccacattcttgttcccaagaggtgcgattgaaagcgatgtccaggtcaccgcttactaaaggtctaaatcaacttgaacacctcgagttagataagtcactaactgcgtggtcgtgggcagaagatgatcctttgtacctcgcaggtgagaacttaaacggcagttacctcattgtcgcaggacgagtgcgggtctctcgcgacaccatcgacgggaaagaactcaccgttgatattgcaacgcccggcgatgttattggtgcgatagatacagaacctcagccggcagtagattccgcttgggcaatagaaaccacctgtgcgctgtttcttccagcaaccgcgttggcaactgtgattgaacagcatccaagttttgctttggcgatgattcggatgcagcagcaacgtttggctacagccagagatcatgaaattaacctgactacgaccacagttgagcaacgagtagctattgcagtgagaactctgggacgaaaaatcgggcaacgacgacccgatggaatcttgctcattcaagttcgaatccggcgggaagatgttgcgggtttagcaggcaccaccgtggaatctacttctagagttttggcgcgattacgtaaagaaggggtcattgatagcggtagggaatgattgccgtggtcgatgaacgg

SEQ ID NO: 258 - protein, 205 aa, Corynebacterium glutamicum
MSRSPLTKGLNQLEHLELDKSLTAWSWAEDDPLYLAGENLNGSYLIVAGRVRVSRDTIDGKELTVDIATPGDVIGAIDTEPQPAVDSAWAIETTCALFLPATALATVIEQHPSFALAMIRMQQQRLATARDHEINLTTTTVEQRVAIAVRTLGRKIGQRRPDGILLIQVRIRREDVAGLAGTTVESTSRVLARLRKEGVIDSGRE

SEQ ID NO: 259 - DNA, 900 bp, Corynebacterium glutamicum
  CDS (101)..(877): RXN01349
agttgtcagctgggatttgccgatggtgttatctttgatatttaccttaaccccgtttctaattcacgttttctcgttacccgaaaggaattgatcgattatggcgacatcacgtcgagatgccgaaaacatagaccaggccggtagcgaattcattgaatctgattcaggacacaccgcaacccctgaagaggtagtagccaccgctctgacattttttgcagaggatggttttagcgaaaccaaattggagaaaatcgcgaaggcatctggcatgtccaagcgcatgatccactatcactttggcgataagaaaggcctgtacatcaaggctgtttcctacgcgttgcgattgctgcgcccagaggctgaagcgatgcaacttgattccgcggtaccagttgatggtgtccgcaaaatcgtcgaggctttatatacctgcatcaccaagcacccagaagcagtgcgcctgctattgatggaaaacctgcatagccaagacagcgtggattccaccgcggcatattccgatgaatccaatgtgctgctcaacctggataagctgctcatgcttggccaggatgccggcgccttccgtcctggaatctccgcagaagacgtactggttcttattagctccctggcctacttccgcgtatccaacaaggtcacgttgaagaacctctactcccttgatttggaatcagaggccaatattgaaggcatgaagcgcatcgtcgttgacacggtgctggcattcttgacctcaaatattcaaaattctggcaactccagctacctggttgttggtggcaagactgcagaaccagaaactgatgacagcgtctacagctttgatacggacgtgttcgaaaactaaagggtatcgagtagtttcaa

SEQ ID NO: 260 - protein, 259 aa, Corynebacterium glutamicum
MATSRRDAENIDQAGSEFIESDSGHTATPEEVVATALTFFAEDGFSETKLEKIAKASGMSKRMIHYHFGDKKGLYIKAVSYALRLLRPEAEAMQLDSAVPVDGVRKIVEALYTCITKHPEAVRLLLMENLHSQDSVDSTAAYSDESNVLLNLDKLLMLGQDAGAFRPGISAEDVLVLISSLAYFRVSNKVTLKNLYSLDLESEANIEGMKRIVVDTVLAFLTSNIQNSGNSSYLVVGGKTAEPETDDSVYSFDTDVFEN

SEQ ID NO: 261 - DNA, 792 bp, Corynebacterium glutamicum
  CDS (101)..(769): RXN00467
agctgatggaaaagaacttctcaacattctccgcaacagaaaactacccgcactggaatcagctccgctgggacaaaacagcctggactaaggtgtaatcatgcacatctcagatcttcccgataggtcccaggactacctgaagacaatctgggacatcacagaactccttgatgatcaaccagcagcactcggcgatatcgccgaaaaaatgaaccagaaaactcctaccgcctccgaagcaatcaaaaagctggcggcaaggggcctggtcaaccatgaaaaatatgctggtgtcaccctcactgaacagggcaaaacgctagccatcgacatggtgcgacgccaccgcctgctggaaaccttcctccacgatgttttgggatacacctgggacgaagtccacgccgatgcagacctgttggaacatgcagcctctgatcagctcatcgaacgcatcgatgctcacttgggtcgtccacgcaaagatccccacggcgatcccataccaactgccgaaggcgttattgaagagtctccccgaaccaccctcgaggcagttcagccaggggagactgtcacgatttccagggtcaaagacattgatcctgaattgctgcgctacctcgcgcaatacaacgtctcaccaggatgccggatcaccgttgcgtccggcccactagctggcatggtgcatgtcgttgtagaaggcaccgacaccagcttccccctggccgaaacgcaactgccattaattacagtgcaggactaagcagattcatcataatggtg

SEQ ID NO: 262 - protein, 223 aa, Corynebacterium glutamicum
MHISDLPDRSQDYLKTIWDITELLDDQPAALGDIAEKMNQKTPTASEAIKKLAARGLVNHEKYAGVTLTEQGKTLAIDMVRRHRLLETFLHDVLGYTWDEVHADADLLEHAASDQLIERIDAHLGRPRKDPHGDPIPTAEGVIEESPRTTLEAVQPGETVTISRVKDIDPELLRYLAQYNVSPGCRITVASGPLAGMVHVVVEGTDTSFPLAETQLPLITVQD

SEQ ID NO: 263 - DNA, 861 bp, Corynebacterium glutamicum
  CDS (101)..(838): RXN02954
ttcgccacactcccaatatctaccaaaaatggtgatctattatacataatggaattaccaaagcttcatatcacttttccacagcctgaaagaacatactatgtccgcagctttacctcacacagcagcagatcccgtacacaccaccccagcgaaaccgctgctcgatcatgtcttagattcactaggacgcagcatcatcagtggtgaaatggaagccggtagcacattcaaactgcaagacatcggtgaaaaattcggtatctcccgcaccgtcgccagagaagccatgcgtgccttagagcaacttgggttggtggcctcatcgagacgaattggtattacagtgctctcgcacgagcactgggctgtctttgacaaagccattattcgctggcgcctcgaagatgagcgtcaacgtgaacagcaactgcagtcactcaccgaacttcgtattgccattgaaccaattgctgcacgcagtgttgcccttcatgcatcgagcgcagagattgctatcatcggtgatcttgctgcacgaatgcgtaacctcggtgaagctggtcgtggcgcatcacaagaattcctagacgcagatgtgaaatttcatgagcttattttgcagtattgccataatgagatgttcgctgccatggcaccacccataaaagctgtactagtcgggcgcaccacacttggccttcaacccgatcgacctgccgaagaagtcttggacaatcatgatgctctcgcacacgcactaagtgttcgtaatgcagacctcgccgaaaaagcatccaggagcattctgaatgaggtgcgcgacgcactgacctcgtaattgccactaaacgagtcact

SEQ ID NO: 264 - protein, 246 aa, Corynebacterium glutamicum
MSAALPHTAADPVHTTPAKPLLDHVLDSLGRSIISGEMEAGSTFKLQDIGEKFGISRTVAREAMRALEQLGLVASSRRIGITVLSHEHWAVFDKAIIRWRLEDERQREQQLQSLTELRIAIEPIAARSVALHASSAEIAIIGDLAARMRNLGEAGRGASQEFLDADVKFHELILQYCHNEMFAAMAPPIKAVLVGRTTLGLQPDRPAEEVLDNHDALAHALSVRNADLAEKASRSILNEVRDALTS

SEQ ID NO: 265 - DNA, 480 bp, Corynebacterium glutamicum
  CDS (101)..(457): RXN03023
ggtattacccgaaagtaatgtcgttaatactgtttttaatggctataaagaggcatagggttagttatatgagtaaccaaccatcgggatcgtcgcgaccgtgcctctgtataaacagatcgcttctttgattgaggactccatcgttgacggaaccttgagcattgatcaacgcgtgccttctactaatgaactagccgcgttccatcgcattaatcccgccaccgcacgcaacggcctgaccctccttgtcgaagccggcatcctctataagaagcgtggcattggcatgttcgtcagcgcccaggccccagcactcatccgagagcggcgagatgccgccttcgcggctacttatgtagcaccgcttatcgacgaatccatccaccttggtttcactcgtgcgcgcattcacgcccttttagaccaggtcgctgaaagtaggggcctgtacaagtagcgcttaaaccctcttgacct

SEQ ID NO: 266 - protein, 119 aa, Corynebacterium glutamicum
VPLYKQIASLIEDSIVDGTLSIDQRVPSTNELAAFHRINPATARNGLTLLVEAGILYKKRGIGMFVSAQAPALIRERRDAAFAATYVAPLIDESIHLGFTRARIHALLDQVAESRGLYK

SEQ ID NO: 267 - DNA, 843 bp, Corynebacterium glutamicum
  CDS (101)..(820): RXN03127
aggtagaacatctgaaagcacttcagataagacggatggggtctgatggaaacgacagtcgatatgatcagaaccatctccagattaggaagtgaacacaatggaaagctccaaaaagacttcgcgatcaaggtccactactcaagaagcagtgcgcgacattaaaaaatacattcgggacaaccggctgcgtacgggagaccttcttccttccgaagcgttcttatgtgaggaattgggttgttcccgttctgcgatcagggaggcgatccgcgcgctcgtgaccttggacatcgtcgaggttcgccacggctacggcactttcgtgtccaggatgtccctcgagcccctgatcaacgggatggtgttccgcacggtgttggacaatgacacctcggtggaaaaccttttctacgtggtggatacccgcgaaatccttgacctttcacttggcgaagagctgatcgaggtgttcaccgacgatgaccgcgagctactccttgatctggtggacaagatgcgcgagcacaacgatcagggcgaatcctttgtggtggaggatcaaaaattccaccgagcactcctagcgcgaacgaaaaacccgctgattagagagctcaacgatgcgttttggcagatccaaaccgaggcgcagcccatgctcaatctggctatgcccgcagacatcgacgaaaccatcaaagctcacagcgacatcgtcgaagcgctctccagcggcaacatcgacgattatcgcagcgccgtgctcgctcactacgcgccgtttcgccgcatgatttccaacatgctcgatgcgcactagcctcattgcgcgcgggttgt

SEQ ID NO: 268 - protein, 240 aa, Corynebacterium glutamicum
MESSKKTSRSRSTTQEAVRDIKKYIRDNRLRTGDLLPSEAFLCEELGCSRSAIREAIRALVTLDIVEVRHGYGTFVSRMSLEPLINGMVFRTVLDNDTSVENLFYVVDTREILDLSLGEELIEVFTDDDRELLLDLVDKMREHNDQGESFVVEDQKFHRALLARTKNPLIRELNDAFWQIQTEAQPMLNLAMPADIDETIKAHSDIVEALSSGNIDDYRSAVLAHYAPFRRMISNMLDAH

SEQ ID NO: 269 - DNA, 1691 bp, Corynebacterium glutamicum
  CDS (1)..(1668): RXN03155
ggatacccaccaccgcccaccgcctcaaaagacgctgcgggtgggttgccacaactgatcagagagcttctcgacgcgacccccatcgatcattggtccaacgatcggcctactctcacgctgccagagcattgggtgacagacatcgacattaagaaccctgtgcttcgggaagtcgcctcccatcccttcttcgatggctgcccgatcggagatttagatgccgatgcctttgtggaggatggcaccctcattcacgaaaacgggactttaagattccgcagccctgaggaacgcaccttggttcgggcttctactcccccatcgatggcaagaagcccgcgggagtgggaatcgacggagggaggcgtcgataagctaattgccgcaggaaacctgcccctggcccgactgcatgtagaggaactaccccgtgccgatgagcagcgcgcatttttggcgctgtacggcgggcagtcgtttgaggcggcctcggcgtcgccgttttatgcgctggccacctggaatccggaggcgttgcggggcgatccgaccttcgatatgttcgccgatgcgctagacactgggcattacagggaagtcccgcgtccggatgcccctgaagaaagccagatccacgatttcatcagtggctggctggcgttggtttacgatgatcccctcaccgcccgccgtctgctctccagtaggggcccctccgatttggtgggactgtggcagtcggcgtttttggcgcgagcgcactacgtgctgggagaattccaagaagcctccgccgttgtcgaacgcggcctagccaccggcgaccgcaccggagcctccctactcgaacccgtgcacctgtggaccggcgcccaagtcgcagccatgactgggcgcaccgaattggccaaccactatttacagcgcctgaccgtgcccgacgatgcgttcctcatccaaaaactcagcgcatccatgggcaaattgatcaccgcatccatgacctcagacacccgcgcagcaaccttggccggcgaccgcatggcgtcggtcgtatacaccaccaatacccagcagcccggattttgggcctgggaagacatgtatgcgatctcattgatccgaacgggacgcatcgacgccgcagccgccgtcatggatggcatccctgactccaccatcccctcgctgcgtgcccgaaatttggtgccccaagcaaacatcgaaatccaacgaggctccacagcacgaggcgtaaaaatgctctccgaagccgtcgacctcatttcctccgtcaacatgccagcatatgaagcccgcatcctcttcgaatacgggctggttctacgacgcatgggcaggcgcagccaagcagccgaaatgttcacccacgccgaagaagtcttcaccgccatgggtgcggtcactctggctgcccgctgccacggcgaacgacgagtcgcaggcgttgggccacgcagatcagcgcagggactcacccctcaagaggaacaaatcactgcgctggttgtcgacggctgctccaaccaagaagtcgcccgtgagctttccctctccgccaaaacggtggaatatcacctcacgagggtgtacaaaaagctcggggtgagctcccgtggagagcttcgagaattactgaaggtctgacacagcgttgttcagcagct

SEQ ID NO: 270 - protein, 556 aa, Corynebacterium glutamicum
GYPPPPTASKDAAGGLPQLIRELLDATPIDHWSNDRPTLTLPEHWVTDIDIKNPVLREVASHPFFDGCPIGDLDADAFVEDGTLIHENGTLRFRSPEERTLVRASTPPSMARSPREWESTEGGVDKLIAAGNLPLARLHVEELPRADEQRAFLALYGGQSFEAASASPFYALATWNPEALRGDPTFDMFADALDTGHYREVPRPDAPEESQIHDFISGWLALVYDDPLTARRLLSSRGPSDLVGLWQSAFLARAHYVLGEFQEASAVVERGLATGDRTGASLLEPVHLWTGAQVAAMTGRTELANHYLQRLTVPDDAFLIQKLSASMGKLITASMTSDTRAATLAGDRMASVVYTTNTQQPGFWAWEDMYAISLIRTGRIDAAAAVMDGIPDSTIPSLRARNLVPQANIEIQRGSTARGVKMLSEAVDLISSVNMPAYEARILFEYGLVLRRMGRRSQAAEMFTHAEEVFTAMGAVTLAARCHGERRVAGVGPRRSAQGLTPQEEQITALVVDGCSNQEVARELSLSAKTVEYHLTRVYKKLGVSSRGELRELLKV

SEQ ID NO: 271 - DNA, 774 bp, Corynebacterium glutamicum
  CDS (101)..(751): RXN01315
catgtgcggttgtgtcctaagtcattgatgtcacctaacgcccctaagttcactcggtgcaatattgcactgagtgcaagtttacactaggtttacttcagtggatattgaagagcagccctcgttaagagaaatcaagcgccaaatgaccctggaagcgatagaagataacgcaaccaggctcattctggagcgtggcttcgacaatgtcacaatcgaagacatctgcgcagaggcagggatatccaagcgcacattctttaactacgtggagtccaaagagtctgtggccatcgggcacacagccaagctcccaacggatgaagaacgtgaagcattcctggctacgcgtcatgaaaatattatcgatactgtatttgacctggtaatcaacctctttggcaaccacgacaactccaagtctggagttgcaggcgacattatgcgtcgacgcaaagagatccgggtgaagcatccagaactggcagtgcaacatttcgccaggttccaccaagcacgcgaagggctagaacacctaattgttgagtacttcgaaaaatggccaggctcccaacatctagatgagcctgcagatcgagaagcaatcgccatagttggcctgctgatctcggtcatgcttcaaggttctcgtgaatggcacgacatgccacaaggcacgcaagctgatttccaagcctgctgtcgcaaagcaattaaaaatacttttcttcttagaggtggattttcagaatgacatcacaggtcaagccggac

SEQ ID NO: 272 - protein, 217 aa, Corynebacterium glutamicum
VDIEEQPSLREIKRQMTLEAIEDNATRLILERGFDNVTIEDICAEAGISKRTFFNYVESKESVAIGHTAKLPTDEEREAFLATRHENIIDTVFDLVINLFGNHDNSKSGVAGDIMRRRKEIRVKHPELAVQHFARFHQAREGLEHLIVEYFEKWPGSQHLDEPADREAIAIVGLLISVMLQGSREWHDMPQGTQADFQACCRKAIKNTFLLRGGFSE

SEQ ID NO: 273 - DNA, 480 bp, Corynebacterium glutamicum; identical to SEQ ID NO: 265
  CDS (101)..(457): RXN00035

SEQ ID NO: 274 - protein, 119 aa, Corynebacterium glutamicum; identical to SEQ ID NO: 266

SEQ ID NO: 275 - DNA, 810 bp, Corynebacterium glutamicum
  CDS (101)..(787): RXN00049
ctgaatcatgattcataaatgaacaagggttcagattttacaatacccccattccacccccttatatttaagtcaccgcagatcagctaaggttttccctatgcccacgccttcgcagcacaaggacgcttcaacagcacaaaccgacaaccaggtaccaactggccgccgtgcacaaaaacgcgaacaaacccgcgcgcgcctgatcacttccgctcgcacactcatggcagaacggggtgtcgacaatgtaggaatagctgaaatcaccgaaggcgcaaacatcggaacgggaaccttctacaactacttcccagaccgtgaacaactactccaagctgtcgcagaagatgcctttgaatccgtgggaattgccctcgaccaggtgctaaccaaattagacgatccggctgaagtatttgcagggtcgcttcgacatctagtacggcactcgttagaagatcggatttggggcggatttttcatacaaatgggtgctgctcatcccgtactcatgcgcatcctaggaccccgcgcacgccgagatctacttcatggtttagaaactggccgattcaccatcgaagatctggacctagcaaccacatgcacttttggttcactcatcgcagcgatccaaatggcgctttctgcagatcaagattccaacgatgacaaagatcagattttcgcagccgcgatgctccggatggtgggtgttcaagcagcagaagcccgggagatcgcttcgcgtccactccccgaaatatccccagtcaaaccgcagtagtgatcgggcctcaaataaac

SEQ ID NO: 276 - protein, 229 aa, Corynebacterium glutamicum
MPTPSQHKDASTAQTDNQVPTGRRAQKREQTRARLITSARTLMAERGVDNVGIAEITEGANIGTGTFYNYFPDREQLLQAVAEDAFESVGIALDQVLTKLDDPAEVFAGSLRHLVRHSLEDRIWGGFFIQMGAAHPVLMRILGPRARRDLLHGLETGRFTIEDLDLATTCTFGSLIAAIQMALSADQDSNDDKDQIFAAAMLRMVGVQAAEAREIASRPLPEISPVKPQ

SEQ ID NO: 277 - DNA, 1032 bp, Corynebacterium glutamicum
  CDS (101)..(1009): RXN00486
gtttattcatgcccttgattattgccaaagaaacctttaaggactagatcgaaaaacagccaactatagttaagtaatactgaacaattttggaggtgtcgtgctcaatctcaaccgcttacacatcctgcaggaattccaccgcctgggaacgattacagcagtggcggaatccatgaactacagccgctctgccatctcccaacaaatggcgctgctggaaaaagaaattggtgtgaaactctttgaaaaaagcggccgaaacctctacttcacagaacaaggcgaagtgttggcctcagaaacacatgcgatcatggcagcagtcgaccatgcccgcgcagccgttctagattcgctgtctgaagtgtccggaacgctgaaagtcacctccttccaatccctgctgttcacccttgccccgaaagccatcgcgcgcctgaccgagaaatacccacacctgcaagtagaaatctcccaactagaagtcaccgcagcgctcgaagaactccgcgcccgccgcgtcgacgtcgcactcggcgaggaataccccgtggaagtcccccttgttgaggccagcattcaccgcgaagtcctcttcgaagaccccatgctgctcgtcaccccagcaagcggcccatactctggcctcaccctgccagaactccgcgacatccccatcgccatcgatccacccgaccttcccgcgggcgaatgggtccataggctctgccggcgcgccgggtttgagccccgcgtgacctttgaaaccagcgatcccatgctccaagcacacctcgtgcgtagcggcttggccgtgacattttcccccacactgctcaccccgatgctggaaagcgtgcacatccagccgctgcccggcaaccccacgcgcacgctctacaccgcggtcagggaagggcgccaggggcatccagccattaaagcttttcgacgagccctcgcccatgtggccaaagaatcttatttggaggctcgtctagtagagtgagttcttgtgagccttcagac

SEQ ID NO: 278 - protein, 303 aa, Corynebacterium glutamicum
VLNLNRLHILQEFHRLGTITAVAESMNYSRSAISQQMALLEKEIGVKLFEKSGRNLYFTEQGEVLASETHAIMAAVDHARAAVLDSLSEVSGTLKVTSFQSLLFTLAPKAIARLTEKYPHLQVEISQLEVTAALEELRARRVDVALGEEYPVEVPLVEASIHREVLFEDPMLLVTPASGPYSGLTLPELRDIPIAIDPPDLPAGEWVHRLCRRAGFEPRVTFETSDPMLQAHLVRSGLAVTFSPTLLTPMLESVHIQPLPGNPTRTLYTAVREGRQGHPAIKAFRRALAHVAKESYLEARLVE

SEQ ID NO: 279 - DNA, 873 bp, Corynebacterium glutamicum
  CDS (101)..(850): RXN01081
cattggtatttgctcgaaagcacaacttaaaacagtaataatggtaatcacattcttttctattaagtaagcaagtacaccggcccattaaagaggcaccatgaccccagcaaacgaaagtcctatgactaatccattaggttctgcccccaccccagccaagccacttcttgacagtgttcttgatgagctcggtcaagatatcatcagtggcaaggttgctgtcggagataccttcaagctgatggacatcggcgagcgttttggcatttcccgcacagtggcacgcgaagcgatgcgcgctttggagcagctcggtcttgtcgcttcttcacgtcgcattggcattactgttttgccacaggaagagtgggctgtttttgataagtccatcattcgctggcgtctcaatgacgaaggtcagcgtgaaggccagcttcagtctcttaccgagcttcgtattgctattgaaccgattgccgcgcgcagcgttgctcttcacgcgtcaaccgccgagctcgagaaaatccgcgcgctcgcaacagagatgcgtcagttgggtgaatctggtcagggtgcgtcccagcgcttcctcgaagcggacgtcactttccacgagctcatcttgcgttattgccacaatgagatgttcgctgcactgattccgtcgattagcgcggttcttgtcggccgcaccgagctcggcctgcagcctgatctgccggcgcacgaggcgctagacaaccacgataagcttgccgacgccctccttaaccgcgacgccgacgccgcagaaactgcgtcccgaaacatcctcaatgaggtgcgcagcgcgctgggcacgctgaactaacgtgatacgcgcactgcgtt

SEQ ID NO: 280 - protein, 250 aa, Corynebacterium glutamicum
MTPANESPMTNPLGSAPTPAKPLLDSVLDELGQDIISGKVAVGDTFKLMDIGERFGISRTVAREAMRALEQLGLVASSRRIGITVLPQEEWAVFDKSIIRWRLNDEGQREGQLQSLTELRIAIEPIAARSVALHASTAELEKIRALATEMRQLGESGQGASQRFLEADVTFHELILRYCHNEMFAALIPSISAVLVGRTELGLQPDLPAHEALDNHDKLADALLNRDADAAETASRNILNEVRSALGTLN

SEQ ID NO: 281 - DNA, 998 bp, Corynebacterium glutamicum
  CDS (1)..(975): RXN01160
aaatcatccaacaaaatcagcgaccttgcccgccagcttaatctgttgccgtatttcaccaggtataaaggccgtaccgtcatggaagcagcgcgcgatcttggccaaccctcctcccaaatcatggaagacctcaacagattatggatgtgtggtctgccaggacttcttccaggtgacttggtggagcttgatcattcctttaaggaagtaaaaatccacaatgctcaaggcatggataaacccttgcgcctcacaccaactgaagccggtgttttgctgctgacacttgaatccctggaatccctccccggtattgcgaaacaggaagcggtcgtatctgctgcgaacaagctacgcgccatcatgggggagtattcctcgactgttttcgactccactggagaagacctcgatgctgaagttctagagatcatccgcgacgccatggatttacaccagcaggtcagttttgaataccactcgcacagatcagacaacaccagcctgaggcaagtcagccctgctcatatcttcacccatgaaggcgaaacctacatcaaagcctgggaagaagctgtgaaccaatggcggacgtttaggcttgatcgcatccgaagcattgtgcttcttgacagcaaagcagtgcacccggcgcgaggggtttcagtatccacggacgatccttttgagttcgcaaaatcttccgatattgccacgttattgctgcgtgaggacgcaatgtggttaggcaattacatggccatggaggtggatgaaacggtggaaccgattcgcgatagcgacggattcagctggcacacagtccactttccgctgctttctagggattggttcgtccgattcgcgattggccatgctgagcatttgaaagtaactagtcccgaagatcttcggaaatgcataaagcaaaaggcttttagtggtttgtcagcgtatgatcatcacgtagagtaacacccaagagtaagacgcaa

SEQ ID NO: 282 - protein, 325 aa, Corynebacterium glutamicum
KSSNKISDLARQLNLLPYFTRYKGRTVMEAARDLGQPSSQIMEDLNRLWMCGLPGLLPGDLVELDHSFKEVKIHNAQGMDKPLRLTPTEAGVLLLTLESLESLPGIAKQEAVVSAANKLRAIMGEYSSTVFDSTGEDLDAEVLEIIRDAMDLHQQVSFEYHSHRSDNTSLRQVSPAHIFTHEGETYIKAWEEAVNQWRTFRLDRIRSIVLLDSKAVHPARGVSVSTDDPFEFAKSSDIATLLLREDAMWLGNYMAMEVDETVEPIRDSDGFSWHTVHFPLLSRDWFVRFAIGHAEHLKVTSPEDLRKCIKQKAFSGLSAYDHHVE

SEQ ID NO: 283 - DNA, 3495 bp, Corynebacterium glutamicum
  CDS (101)..(3472): RXN02097
ttggctacagatgtttcagcgcttgcagtggggtagtgtgtttaaacatcacaattagttctagaggaaaacgcattttttgcgcggggagagtgtatacatgccggctggcatcgcagacatgacagattcattgctcggatgggcatcacaaactgagctggatctgaaccagcgtcttgcaggggtagagtactttccacaaattcagctgcgacacgatgagctcgagcgcattcatcggttttacggcacctttttgtcccgccaggtaggcgcgggcgcaagccttggggatctttttgaaatgaccccatgcctgacagtcaccaccttggtgtctcgggcgtcacggatcagcgatccagcagatttcttcggtgaatacatcggaggactgggacttagcgcagaacacgcagcagttgttgaagggttgaccgaaaagctcttcgcacaggctggcctgctcgttcctgagggaattgcatctccattggagttgttatccatccacgcaggcattagtaaccacgaagtggccgcagtgctgaccgaagtggaaaacggcaccaccgaatatccattcatgttcgacgctgtcctgcgcctaacccctgagtgggcacagacccttatcggcggagttcaagaactcattgaatttgccaccacccaccgaacttcttggtcagaccgccagcgcgaatcctcactgccagccatgatcgatgagatcgttgtggcggaacttcgggaacgcccagttggtactgccgaccgtgaaaactccgttggtgtggcacttcgtgagcttcgcccacgcctcatcctggatgcagaacgccgcaaagtctgcctgcgtctacctgaacagcgcgtcagcgacgatgaaatcaactggcgagtcagcctagaaggcaccacccggattttctccacccgccgagcatggggcgatacttctggatactccgaagccctcgacatcactgtcgagcgtcaaatccgcgaaaccaccgtcaccgacacctcaaaccaaatcacctgggttgtcccagtcgtggacttcaacgacccagtgctggtgttttccgcgcgcggtgaaaacctcaccgacaaggtctccctgcaccatcaagagatttacgttctcgcgccagcggaagcaaaactcgaagacatggtcactggccagccagtaccagttattgagcaattcctcgtagagggctggaactcatgggtgtgctcccgcgtggacgcccgtggcctgtcctctctgaaggtcaacaaagaagtccgatgcattgacccacgtcgacgcgttgccttccaccacccagccgaattggtccctcacgtacgatccatttccggactccccgtacacgcgcagtccctgatcgccgagttcccaccaaccctgagcggacaagacgaaacctggatgctctccatctcggctttcgcaggtgtaggcgctgctggtgaagaaatcgccgagccagagcctttggaagtccctgccgacggtggccttttcgccatcttcgacccagaaatatacgacgccccatgggtgggtgaatacctggtccgactccgcggcccacgcaatgaatccttccgacccgaattcgccatcgtcgaagacatgaccaccgaattcgaagtcgcctcaggtgcatcatttcgaatcccaaccaccactggtctcagcgaagccagcctacgcgtgcgttccggtgaaaagcacttcaccgcagagccacgcctggtcaccgttgaagcaaccgaccccaacgcatcattcgtggtcaccaccgatgaaggcgatcaaatgccattgcgatttgtgccaccacaaatcgccatcgaacttccactgaccaccgagccaccaacctggcgcgtcacccgtactgtctgtggaccacgcgacctcgacggtgcaggcgaactccgcatccgcaccggtgtcgatgtcggcgatccaaaggtcagtgtgcgcaaccaccacggttcaccactgcgaaccgtgaaaatggtcacccctgacaacggccgtacctggattgccagcatgaaggaaatcgcagccagtacctttgtgatgccacgcggatccatcgaatttgagtggactgaccgcaaggttgaccgtcgcgtttccgtgacgattgctgtcattgacaaaactgagaactttactggcatcaccatcgaagatggaaagctcgtattcgaagaactcgcagccggtcgccaactcgctgcatgggtgtggccacaaaccgcaccgtgggtaagcgcagtggaacttgctgtcaccggaccagagctggaactccctgaagttctcgtcggcgcaggcaacctgattgttcaactccacaccgctgacccattcactacctccgtgaccccactgtcaccaggaaaagctgcggtcaccgttgagcaagaaggctactactcagcacaaaccgaagaatatgcacagctttcagcattcttcggtggggaagtagaagaaccaccaatcagtgacgctgtggtccccgcactttgggatgtttcccatatctggaccgaacagggaaacaccgagcatcttccagtagtccatgccgccctgcgctcctcaccagccgcagcactgaagggtctgtccgcttcgctggttcccgcacaggcactacctggaaaagtcatttcctccggactggcagcctcaccgttcaccacggaatcaccagcaacagaagtgcaccgcaccgcatggatcggaaccctgcaactcctgggtgcactgccaagcgcattcaaggaagccgaagagcttggcaaccgcacaccactgctgccaatcctcggacaacttgaggaagtcgccggcaagaacatcctgtccacccttgcaactggccgtgactccactttggacaccgcatgcatcgaccaatccaccgttgcgattgccggcatgaacgaaacccagcaaaaagccctgctggacatgttcttcagcaacgccgacatcgttcctggaccactaatggaagacaacacccgcctcatggcagtgttcgaaaccttcaagaagcgcgatgcactccgtgaggttctccagactgaaggcttgattaagaccgctgtagaacttcttcgtgccatgcgtggaacccagcgtcagctgtattcctccgcacgtattcgattcgacaagctcgatggtgtcaacactgacaacccagaaaacatgtgggcactcaccccagttgtgtcactggtgttcgcgttgtcatcccgtttgcatgcacacgaattgatcggcaagacccgaactctcgatcgtgcatctgccggttggggtcgaatcgctgatctggtgccagaccttgtcaccggtgacttgatctccgcggaggcaatggttttgggagctcgaaacccaggactcgtcgattagtccctgatttcatcggaggg

SEQ ID NO: 284 - protein, 1124 aa, Corynebacterium glutamicum
MPAGIADMTDSLLGWASQTELDLNQRLAGVEYFPQIQLRHDELERIHRFYGTFLSRQVGAGASLGDLFEMTPCLTVTTLVSRASRISDPADFFGEYIGGLGLSAEHAAVVEGLTEKLFAQAGLLVPEGIASPLELLSIHAGISNHEVAAVLTEVENGTTEYPFMFDAVLRLTPEWAQTLIGGVQELIEFATTHRTSWSDRQRESSLPAMIDEIVVAELRERPVGTADRENSVGVALRELRPRLILDAERRKVCLRLPEQRVSDDEINWRVSLEGTTRIFSTRRAWGDTSGYSEALDITVERQIRETTVTDTSNQITWVVPVVDFNDPVLVFSARGENLTDKVSLHHQEIYVLAPAEAKLEDMVTGQPVPVIEQFLVEGWNSWVCSRVDARGLSSLKVNKEVRCIDPRRRVAFHHPAELVPHVRSISGLPVHAQSLIAEFPPTLSGQDETWMLSISAFAGVGAAGEEIAEPEPLEVPADGGLFAIFDPEIYDAPWVGEYLVRLRGPRNESFRPEFAIVEDMTTEFEVASGASFRIPTTTGLSEASLRVRSGEKHFTAEPRLVTVEATDPNASFVVTTDEGDQMPLRFVPPQIAIELPLTTEPPTWRVTRTVCGPRDLDGAGELRIRTGVDVGDPKVSVRNHHGSPLRTVKMVTPDNGRTWIASMKEIAASTFVMPRGSIEFEWTDRKVDRRVSVTIAVIDKTENFTGITIEDGKLVFEELAAGRQLAAWVWPQTAPWVSAVELAVTGPELELPEVLVGAGNLIVQLHTADPFTTSVTPLSPGKAAVTVEQEGYYSAQTEEYAQLSAFFGGEVEEPPISDAVVPALWDVSHIWTEQGNTEHLPVVHAALRSSPAAALKGLSASLVPAQALPGKVISSGLAASPFTTESPATEVHRTAWIGTLQLLGALPSAFKEAEELGNRTPLLPILGQLEEVAGKNILSTLATGRDSTLDTACIDQSTVAIAGMNETQQKALLDMFFSNADIVPGPLMEDNTRLMAVFETFKKRDALREVLQTEGLIKTAVELLRAMRGTQRQLYSSARIRFDKLDGVNTDNPENMWALTPVVSLVFALSSRLHAHELIGKTRTLDRASAGWGRIADLVPDLVTGDLISAEAMVLGARNPGLVD

SEQ ID NO: 285 - DNA, 636 bp, Corynebacterium glutamicum
  CDS (101)..(613): RXN02266
gaggaaagtagcgctacatctgcatatctacccccttaaaaatgaagcataaaaccgccgtgtaccggccttttattgattttgacgtaagcttgcaccgatgactcaagatgaacacccccgacaggccgactcccatttcaacatgcttttaccggatggaaatgaaaacgcacaccagctttctgtcgctctaaatcaggtggcacatctgttggcctatgatgcggactcttcaattcatcggcctgatgggctaagtctggcgtcctatagaattctcttttcactgtggactgatggcccgatgagtccactccaggtgactgacaagactggaatgaaaaagtctgcgatttctaacctgttaaagccattgctcgctgaatctctgattgtgcaggtgacggcagaaaatgatcgacgctcaaaggttttaagccttagcgaaaaaggcactacatacattcagaaaacagccacccgccaaaatgctttggaatccgagtggtttggcaccctgaccgacatcgagcaggatttattggagtcgttgctcaggaaactgctcgactccaaccgcgcatccaaggttcgtaaaaaccgatctaactagcgtcgatccttagggatgta

SEQ ID NO: 286 - protein, 171 aa, Corynebacterium glutamicum
MTQDEHPRQADSHFNMLLPDGNENAHQLSVALNQVAHLLAYDADSSIHRPDGLSLASYRILFSLWTDGPMSPLQVTDKTGMKKSAISNLLKPLLAESLIVQVTAENDRRSKVLSLSEKGTTYIQKTATRQNALESEWFGTLTDIEQDLLESLLRKLLDSNRASKVRKNRSN

SEQ ID NO: 287 - DNA, 3822 bp, Corynebacterium glutamicum
  CDS (101)..(3799): RXN02362
acaattgttcccattcgcatatctcgtgtccaccagagtcgctacagtaacgagaaacttaattatttgatccgattcttccgttcaaaggcctcattccgtgactatctctcgccgactcaaacaagagcgcagtttcgctgacgatcttcaagatctcaaaactctcaatgatcaactgcggtttacaaacgccaaattgcaagctcgcatcagtggtattggcaatgatggaaagaaaatcacgcgccctaccccactccttgcgctggattttcagctgaccgttgaagaatacgaaacgatcattgcaatcttggtggaagcagttggcggaaatcaatccaagccagcgattcttaaagatctgtttatagaatatccactcgtcttcctggcagcgctttctggaaccgccatgctcgatgctcaagaaggtttctggcctgcgttctggaaacgcactcaggtgtcagttccagagcatgtatacgacgcgatccgtaaagaactagttaatagcatccgcaaaaatggcctagaaactttttctctcgctgacctcaatcgacgcgaatatgtcggactcatccaacttcacagtggcctttctgcaaaagacatgctcgccttggtcaaatttatcgatcacactcgagcagaaaaccaaggatgggattctggtgaggactttgcatcatatgcgaagagtgtcttctcctccggggacaacctattaaccacggagtcgctcaagcaattagtcacccacatccctgcgcgttccgtcgacttcatcgccagagtctatgaactaaccaattggtaccgcgacctcaaagacctcaatgaagtagaagccttcgtaggtactcatgggctgccggaattgtctttcaaatttcttctggagtgtctgagcggcgaagctgaacaaattgccgaaaagacgaaagcagcaccagcaagcctggaaaacctggaacctccgcatctctatctggatccacagagttttgaactcagtcttgttttcccagcgatctctaaaactgcagcacttcagattccagcaccagaatggacagtgatttatgacggaaactccattaaagttcgtcccgaacaggactggtcctacggaggtttcgccgaataccgtttgcctttagacaaaccgctctccagcttgagagtcatcactccaacagagaaatccctaattctgattgaaggatttggccacaagaatcccattatgttctttaagaacaacggtcagccatatgcaaaccaagaaatgctcagtggcaacgctgtcacagctatagtcccagctgcagcaatcattcgtgcacgtatgcgagcttccaagactttcaactatcaagacttgggtcccttgtccggatggaacaagtgggtcattcgttcgatcccactcaaacgagctgaatcgatcacagtctcccacggtggcttcagaaaagaactcccagttcgacgcaaagttgatgttcaatggattactgaggatctcacgatcgagaatcttcaaggtctcgatcatgagcccgttttccacacgagtccccgcatcgaattccccacctctggatcaaactgggtaattcagtattcacagattcttccagatggcagcctcatcgaaatggaagattacccagtcgaacctgaaaacttcggatacgaactagacctcttcgaagaatccgacgacccttgggtcgggcaatttttagtaactctgctcaaggatgaaaaagtctatgaaacccgcaaattcaatctcgcggaaggcctcgatctttccctaacattcagcggaggcggacctgaaaatcgatttaggtaccccagcatcaatcagggacaaactggcttaacaaagactttcgcccgttttagttccaattctgaaaagcacatcaggttcccagatgagatcatcgggcttgatgcattcacctctcaaaaagcgtttaacatcgcaagcggtgatttccctgaggactacaacctcgacgttttcatcacgcctccgcaacttcactaccaagtacctgtcacacacagccaaacaaagtgggaaagcacaaagacgacactagatttcaatgactttgccgatggaaacctccagatcagattccctaatgaagtctatgatccaaacttgaaaatcattaaaatggtggcatacaagaaacctgagtccagtgagcctaaatacttaagcaaaattggttcaagcaaagtgtggtctatccctatggatcgcatcaaggaactcatggatgatgatgcccaattccttttgatcgcggagtggttcgctgaaagtaaagaccagcaccgagagaagatcattagcgaagctaagcgaactggaaaaatctccaatgcagcgcttaagagtgctcgtcctcaacctcaagcaagttcccacattgcaacaattgagaaaaagcccctactagctgcggctgaaattaagctttctaccgtggagttggaacttggtcggcacacttctaagagactggaaggctgggcatggtctgcgctcaacccgcttgatccaccaatcaaagtcgatttccaaggaacctcaggctcacttccagacacccacttcgtcgttggccctttaatcgtggaagtgagagaaaaagagtttctctcccaatggcagccaaaagttccctcagttaaagccgtggttgcaaatgatccctcatttgaattggaccctcaatttgatcctttcctcacacaccgatggatgttcgctccacgaagtgggaaggtcttactcccacaagaaatccgcacagtgtgggacgcccgattcaatatgcgccatgtcttagcgcagcgtgaaaaccttcatgtgaaatcgattcaagattttgacgatgccaccagtacctatctcaccagtgatcctcgggtggcattagatgaattggataagagctcaattccgtctaattcccactttgaatcattcatccgatccggattagctgagctttctttcgaagttgacgacacagccggagatatccatcgcgttccctggatcggcctgatccaggaaatgaacgacctcagaattctgcagatacaaggctatgaaacagaagaacgagccatcgaacgccgaaattcgcagagctacatccgtgagataggaggcagtgaattgtggaatatcctaaaaggaaattcagagggattgtctcttgctcaaaaatgcgcaccacaagccactgagattaatgtgattcgtaattcaggcttggaagctatgcgcaatgggctgggcgccgatcagttcagcgccgagtttatttcagcagactcacgcctacgagctcagcttgaatggttggaaaaccgccgagagctcaatgatctcggccagctcccaacgctcttcgatttcgccgagaaatacgagtacctcatcgatcacttaggtgatgatcgcatcaaggtcactgcacgtgagctgtctactcttgcgtcggaacaccgtcgcggcaacgctgaaaactggctttatgcaccatatgtgtcattcatttacagcttgcttaaccgaatgatcgctcatgaagtaatacgtccgatcgctcagatcaattactcacggcacgattgggcaaacgctgctcggctgattcctcgtctcacaggatttgacctggtgagtgccgaagcgaaagtgctcagcgcaataaacaacaacaatataatcccaactgcaatttaaggatcactatgtccaacgca

SEQ ID NO: 288 - protein, 1233 aa, Corynebacterium glutamicum
VTISRRLKQERSFADDLQDLKTLNDQLRFTNAKLQARISGIGNDGKKITRPTPLLALDFQLTVEEYETIIAILVEAVGGNQSKPAILKDLFIEYPLVFLAALSGTAMLDAQEGFWPAFWKRTQVSVPEHVYDAIRKELVNSIRKNGLETFSLADLNRREYVGLIQLHSGLSAKDMLALVKFIDHTRAENQGWDSGEDFASYAKSVFSSGDNLLTTESLKQLVTHIPARSVDFIARVYELTNWYRDLKDLNEVEAFVGTHGLPELSFKFLLECLSGEAEQIAEKTKAAPASLENLEPPHLYLDPQSFELSLVFPAISKTAALQIPAPEWTVIYDGNSIKVRPEQDWSYGGFAEYRLPLDKPLSSLRVITPTEKSLILIEGFGHKNPIMFFKNNGQPYANQEMLSGNAVTAIVPAAAIIRARMRASKTFNYQDLGPLSGWNKWVIRSIPLKRAESITVSHGGFRKELPVRRKVDVQWITEDLTIENLQGLDHEPVFHTSPRIEFPTSGSNWVIQYSQILPDGSLIEMEDYPVEPENFGYELDLFEESDDPWVGQFLVTLLKDEKVYETRKFNLAEGLDLSLTFSGGGPENRFRYPSINQGQTGLTKTFARFSSNSEKHIRFPDEIIGLDAFTSQKAFNIASGDFPEDYNLDVFITPPQLHYQVPVTHSQTKWESTKTTLDFNDFADGNLQIRFPNEVYDPNLKIIKMVAYKKPESSEPKYLSKIGSSKVWSIPMDRIKELMDDDAQFLLIAEWFAESKDQHREKIISEAKRTGKISNAALKSARPQPQASSHIATIEKKPLLAAAEIKLSTVELELGRHTSKRLEGWAWSALNPLDPPIKVDFQGTSGSLPDTHFVVGPLIVEVREKEFLSQWQPKVPSVKAVVANDPSFELDPQFDPFLTHRWMFAPRSGKVLLPQEIRTVWDARFNMRHVLAQRENLHVKSIQDFDDATSTYLTSDPRVALDELDKSSIPSNSHFESFIRSGLAELSFEVDDTAGDIHRVPWIGLIQEMNDLRILQIQGYETEERAIERRNSQSYIREIGGSELWNILKGNSEGLSLAQKCAPQATEINVIRNSGLEAMRNGLGADQFSAEFISADSRLRAQLEWLENRRELNDLGQLPTLFDFAEKYEYLIDHLGDDRIKVTARELSTLASEHRRGNAENWLYAPYVSFIYSLLNRMIAHEVIRPIAQINYSRHDWANAARLIPRLTGFDLVSAEAKVLSAINNNNIIPTAI

SEQ ID NO: 289 - DNA, 1005 bp, Corynebacterium glutamicum
  CDS (101)..(982): RXN02506
cctttccctgaactctaagcaattgtgatctatagtacaaatgcataaacattaaccgcgatatccatctcttgcataccggccgaaaggtttagcacacatgcacctcaatcagctcgaatttttcatcgcagtagcccaacacggacagatcaaccgcgccgccgaagaactcctcatttcccaacccgctctcagccgacagatctccgcacttgaaaaatccgtcggagctccactcttcgaacgccattcccgcggtgtctccctcacaaaggccggagaaatcctccacgaagaagccctccgaacgcttagcaggatgcaatcggtagtcgatgaaatccaatccggtgagcacctcatcaccagcatcaacatcggagttccccctggaatccccatcgactggttgcgctgccaactcatcgatttaggccccgagacccgcatttcactgatcgaatcccccaccgatgatcagctaaaacttcttaaacaacgcgaactcgacatcgccctttgtcgacgccaaagcgaggcctttgccaccacacttgtccacgaacaagaactgggaatcgtcgtccgaaaaaactccgaactgcaccaaaaagtcgcaggaaaagacaacgccacactcttcgatcttgaagggcttcgagtcctcgcacactcccgcggtgaagtaagaattcaggaagaaatcctcaaaaacgccatgctcgccgcaggagttaatgccacgtggatcttccgaaaatttgggcaatatagctcactgatcgcagaccttgtccaggccgatgtcgcactcacaacagaggaatccgcccgcaccaacttccccagctggcaatgggtccccatcgaaggcgaagacgcctccggaaatgaccttgttgttcgcacctggatcacctggaacccccaacccacccccgcggtgaaggccctgatccagaaatttattgacggaaactgagttctaaacagccgccatga

SEQ ID NO: 290 - protein, 294 aa, Corynebacterium glutamicum
MHLNQLEFFIAVAQHGQINRAAEELLISQPALSRQISALEKSVGAPLFERHSRGVSLTKAGEILHEEALRTLSRMQSVVDEIQSGEHLITSINIGVPPGIPIDWLRCQLIDLGPETRISLIESPTDDQLKLLKQRELDIALCRRQSEAFATTLVHEQELGIVVRKNSELHQKVAGKDNATLFDLEGLRVLAHSRGEVRIQEEILKNAMLAAGVNATWIFRKFGQYSSLIADLVQADVALTTEESARTNFPSWQWVPIEGEDASGNDLVVRTWITWNPQPTPAVKALIQKFIDGN

SEQ ID NO: 291 - DNA, 789 bp, Corynebacterium glutamicum
  CDS (101)..(766): RXN02620
gaagcccgtgaaatcgataccaaataggaactctgcacaattactggctacaatctcttgagatcaataggccaaaactttaaggaagtagaattacgctatggcaggagcagtgggacgcccccggagatcagctccgcgacgggcaggcaagaatcctcgcgaggagattcttgacgcctctgctgagcttttcacccgtcaaggcttcgcaacaacctccacgcatcaaatcgctgatgccgtgggaatccgccaagcctcgctgtattatcacttcccgtccaagacggaaatcttcctcaccctgctgaaatctactgtcgagccgtccactgtgctcgccgaagacttaagcaccctggacgccggacctgagatgcgcctctgggcaatcgttgcctccgaagtgcgtctgctgctgtccaccaagtggaacgtcggtcgcctgtaccaactccccatcgttggttctgaagagttcgccgagtaccacagccagcgcgaagccctcaccaacgtcttccgcgacctcgccaccgaaatcgtcggtgacgacccccgcgcagaactccccttccacatcaccatgtcggtgatcgaaatgcgtcgcaacgacggcaagattccaagcccgctttccgcagacagcctcccggagaccgcaattatgcttgccgacgcctccctcgccgtcctcggcgcgccgctgcccgccgaccgggtcgaaaaaacgcttgaactaatcaagcaggctgacgcgaaataaccatccgcgcctgcgaaatc

SEQ ID NO: 292 - protein, 222 aa, Corynebacterium glutamicum
MAGAVGRPRRSAPRRAGKNPREEILDASAELFTRQGFATTSTHQIADAVGIRQASLYYHFPSKTEIFLTLLKSTVEPSTVLAEDLSTLDAGPEMRLWAIVASEVRLLLSTKWNVGRLYQLPIVGSEEFAEYHSQREALTNVFRDLATEIVGDDPRAELPFHITMSVIEMRRNDGKIPSPLSADSLPETAIMLADASLAVLGAPLPADRVEKTLELIKQADAK

SEQ ID NO: 293 - DNA, 654 bp, Corynebacterium glutamicum
  CDS (101)..(631): RXN00826
tcggcgcgcgcgatctggtgctcatcttggtgtgtgctgccatttccgcgatcgctctaaccgtgtccattcagactggtttctttaagttcttgggcacatgatcacagttttaattgatggacaatccggtgcgggcaaaaccaccttggcgggtgagttagctgcccgcaccgggtttcagttggttcatttggatgacttttatcctggttggactggccttgaagcggcatcggagattgttgcacgccatgttttggacgcggacaaccccggtttcttcacgtgggattggcacaacaattgccaaggcgattggatcaagttggagcctggtcgaagtctcattatcgaaggctctggatcaatcactgctgcaacaaaacgcaaggcatcgctgttgggcgagctggtgaccgttcgtatcactggtcctgaggctttaagaaaacagcgcgccctcaaccgcgatcctgattacgcaccattttggaaagtgtgggcgcagcaggagcaacgccatttctctttaggcgttgaggtggatcatgagattgtgctaggttctgatgaggcttcgggacgacccgaagaaatctatgacagcctgggaacggcccagagttcttaagaaagtttgactagagaaca

SEQ ID NO: 294 - protein, 177 aa, Corynebacterium glutamicum
MITVLIDGQSGAGKTTLAGELAARTGFQLVHLDDFYPGWTGLEAASEIVARHVLDADNPGFFTWDWHNNCQGDWIKLEPGRSLIIEGSGSITAATKRKASLLGELVTVRITGPEALRKQRALNRDPDYAPFWKVWAQQEQRHFSLGVEVDHEIVLGSDEASGRPEEIYDSLGTAQSS

SEQ ID NO: 295 - DNA, 555 bp, Corynebacterium glutamicum
  CDS (101)..(532): RXS00070
ccactcgtcctcgacatacttctcctggcactaaacgcaggggttgacacatctgggtagactatcgaagtacattttgtgtcattgaggaggatcaacggtgggtatcaatcgcatcagccaaggctctgccccgaagctgggagtgcgaagcaccagacagcgaaaagccgtaattgacgttcttgaggaaatcgataacttcgcttccgccaaagaaatccatcacgagctatccaccagggaacacaacgtcggcctcacaaccgtctaccgaaccctccaatccctcgccgacatcggagcagtcgacgtacttaccgtcacgggtggagaaactctgtaccgccaatgccacgacgagggacaccaccatcacctggtctgcaccaattgcggtcgcacagtcgaaatcgatggcggtccagtagagacatgggcacaggaaattgccactaaaaacggctttgctctcagtagtcacgaggctgaaatctttggactttgcgctgattgtaaggaaaaagttacgtagttcaaggacatatgaagctg

SEQ ID NO: 296 - protein, 144 aa, Corynebacterium glutamicum
VGINRISQGSAPKLGVRSTRQRKAVIDVLEEIDNFASAKEIHHELSTREHNVGLTTVYRTLQSLADIGAVDVLTVTGGETLYRQCHDEGHHHHLVCTNCGRTVEIDGGPVETWAQEIATKNGFALSSHEAEIFGLCADCKEKVT

SEQ ID NO: 297 - DNA, 936 bp, Corynebacterium glutamicum
  CDS (101)..(913): RXS00133
gttacatcagatgaggatgccctatgggtgtacacatgcgacgggtgtattgcaggaggaaatttgaaggtggatacccagcggattaaagatgatgaagatgctattcgttcggcggctgacatcgctgaaaaccgcaacaggcatcccagtcaccatgttcgccactgtgttgcaggacaatcgcctgcaaattactcagtgggttgggttgcgtaccccggctctgcagaatctggtcattgaaccaggtgtgggcgttggtggacgcgtcgtcgcaacccgtcgtccggttggtgtgagtgattacaccagggcaaatgtcatttcacatgagaaggattccgcgattcaggatgagggccttcattccattgtcgcagttcccgtgatcgtgcaccgcgaaattcgtggcgttttgtatgttggcgttcactctgcggtgcgtctcggcgacactgttattgaagaagtcaccatgactgcgcgcacgttggaacaaaacctggcgatcaactccgcgcttcgccgcaatggcgttcctgatggtcgcggttccctcaaagctaaccgcgtgatgaatggggcggagtgggagcaggttcgttccactcattccaagctgcgcatgctggcaaatcgtgtgaccgatgaggatctgcgccgcgatttggaagagctttgcgatcagatggtcaccccagtccgcatcaagcagaccaccaagctgtccgcgcgtgagttggacgtgctggcttgtgtcgcgctcggtcacaccaacgtcgaagctgctgaagagatgggcatcggcgcggaaaccgtcaagagctacctgcgctcggtcatgcgcaagctcggcgcccacacgcgctacgaggcagtcaacgcagcacgccggatcggcgcactgccttaaaaagattttgctttacgacg

SEQ ID NO: 298 - protein, 271 aa, Corynebacterium glutamicum
MLFVRRLTSLKTATGIPVTMFATVLQDNRLQITQWVGLRTPALQNLVIEPGVGVGGRVVATRRPVGVSDYTRANVISHEKDSAIQDEGLHSIVAVPVIVHREIRGVLYVGVHSAVRLGDTVIEEVTMTARTLEQNLAINSALRRNGVPDGRGSLKANRVMNGAEWEQVRSTHSKLRMLANRVTDEDLRRDLEELCDQMVTPVRIKQTTKLSARELDVLACVALGHTNVEAAEEMGIGAETVKSYLRSVMRKLGAHTRYEAVNAARRIGALP

SEQ ID NO: 299 - DNA, 699 bp, Corynebacterium glutamicum
  CDS (101)..(676): RXS00144
atagtgtcagacaacaaccaggaaactggtcgttgcagagtttttgcaaaattggacatcctttaacggaccgcacagagaggcggggaaggaggtcacgatgagcgaacgtaatagtgctgtactagaactccttaatgaggacgacgtcagccgtaccatcgcacgcatcgcgcaccagattattgagaaaaccgcgcttgattccaaagacgcggatcgggtcatgttgttaggtattccctcaggtggagtcccattggcccgtaggctcgctgaaaagatcgaagaattttccggcgtttcggtagataccggcgctgttgatatcaccttgtacagggatgatcttcgaaacaaaccacaccgcgcactgcagcccacctctattccagcaggtggtatcgataacaccaccgtgattttggtggatgatgtgctgttttccggtcgtaccatccgcgctgcacttgatgctttgcgcgacgttggacgccccaactacatccagttagctgtgttggttgaccgcggtcatcgccagctgcccattcgcgctgactatgtgggcaaaaatctccccaccgcacgcgcggaagacgtttccgtcatgcttacagaaatcgacggccgcgatgcagtcacgctcacccgagaagactctgaaggggattcctagatgaagcacctcctatccat

SEQ ID NO: 300 - protein, 192 aa, Corynebacterium glutamicum
MSERNSAVLELLNEDDVSRTIARIAHQIIEKTALDSKDADRVMLLGIPSGGVPLARRLAEKIEEFSGVSVDTGAVDITLYRDDLRNKPHRALQPTSIPAGGIDNTTVILVDDVLFSGRTIRAALDALRDVGRPNYIQLAVLVDRGHRQLPIRADYVGKNLPTARAEDVSVMLTEIDGRDAVTLTREDSEGDS

SEQ ID NO: 301 - DNA, 1230 bp, Corynebacterium glutamicum
  CDS (101)..(1207): RXS00205
tgggggagtggggataagttcatcttaaacacaatgcaatcgattgcatttacgttccttatcccacaataggggtaccttccagaaagttggtgaggagatggcttccgaaacctccagcccgaagaagcgggccaccacgctcaaagacatcgcgcaagcaacacagctttcagtcagcacggtgtcccgggcattggccaacaacgcgagcattccggaatccacacgcatccgagtggttgaagccgctcaaaagctgaactaccgtcccaatgcccaagctcgtgcattgcggaagtcgaggacagacaccatcggtgtcatcattccaaacattgagaacccatatttctcctcactagcagcatcgattcaaaaagctgctcgtgaagctggggtgtccaccattttgtccaactctgaagaaaacccagagctgcttggtcagactttggcgatcatggatgaccaacgcctcgatggaatcatcgtggtgccacacattcagtcagaggaacaagtcactgacttggttaacaggggagtgccagtagtgctggcagaccgtagttttgttaactcgtctattccttcggttacctcagatccagttccgggcatgactgaagctgtggacttactcctggcagctgacgtgcaattgggctaccttgccggcccgcaggatacttccactggtcagctgcgtcttaacacttttgaaagactatgcgtggaccgcggcatcgtcggagcatctgtctattacggtggctaccgccaagaatctggatatgacggcatcaaggtgctgatcaagcagggagccaatgcgattatcgctggtgactccatgatgaccatcggtgcgttgttggctcttcatgagatgaatttgaagatcggtgaggatgtgcagctcattgggtttgataacaacccaattttccggctgcagaatccaccgctgagcatcattgaccagcacgtacaagagatcggtaagcgtgcgtttgagattctgcagaagctgatcaatggggacaccgcgcaaaaatctgtggtgattccaacgcagctcagcatcaatggatcaacggcggtttcccaaaaggcggccgcaaaggcagcaaaagcagcccaaaaagcagccgcgaaagccgcacagaacacgcaacacgaggtgagcctagatggtgaactctgaacaagcgcttcatcagcatg

SEQ ID NO: 302 - protein, 369 aa, Corynebacterium glutamicum
MASETSSPKKRATTLKDIAQATQLSVSTVSRALANNASIPESTRIRVVEAAQKLNYRPNAQARALRKSRTDTIGVIIPNIENPYFSSLAASIQKAAREAGVSTILSNSEENPELLGQTLAIMDDQRLDGIIVVPHIQSEEQVTDLVNRGVPVVLADRSFVNSSIPSVTSDPVPGMTEAVDLLLAADVQLGYLAGPQDTSTGQLRLNTFERLCVDRGIVGASVYYGGYRQESGYDGIKVLIKQGANAIIAGDSMMTIGALLALHEMNLKIGEDVQLIGFDNNPIFRLQNPPLSIIDQHVQEIGKRAFEILQKLINGDTAQKSVVIPTQLSINGSTAVSQKAAAKAAKAAQKAAAKAAQNTQHEVSLDGEL

SEQ ID NO: 303 - DNA, 1392 bp, Corynebacterium glutamicum
  CDS (101)..(1369): RXS00470
tcataaccaggttgggcaaaagggatgaatccctggttgtggtggggctcctgaaaagtactcatagactctattgtggagtgttgaggctgataagtgaatgggggaaagccctgaaaaggtggcgttcagggtcttccctgatggtttggtgtcgcaggggcatgacatgatcgaagatatgagtaacacacctgcgccttataccccgcagcctgcggggcaagcggtgcctttatatcccacgtttacccggtcaagagatggtcgggttgttgcgggtgtcgcatcggggctggcaaagcatcttaatgtgtcggtgttttgggttcgtgcgctgctgatttttgcggcgttgctgagcggtgcgggtctttttgcgtatgccttgatttggatttttacgcgcattgagaaaaaggggagtggggaggcgtcgacaagcaagcgctgggtgtcgtggtgcctggtgctgctcgctatcggtggtgctgcggcgtcggtgatgctgagcaccggcttcgcggtgggcacgttggtgcccatcggcgtggtcggtgtgggcctgttgatggtgtggctggcgtatgaccgcggggtggaatccggcccgaatctgctgattattgccaccggcggtgtgttgatgctggtggcgatcgtgctgatcgtgatgaattggaacacccaggacggcttcgtcatggcgctggtggccgtggtgctcacgctggtgggtgtggctgcgctgggcgttccgctgtgggtgcggatgtgggatcagctgggcgaggagcgcgcggaaaaagccgcagctgctgagcgcgcagatattgcttcccgcctgcatgattcggtactgcagaccttggcgctgattcaaaagcgtgccgacgaccccgccgaagtcgcccgcctggcccgcgggcaggaacgcgagctgcgtcaatggctgtttgattcccaagataaaacacctcaaacaaccggcactgtctttactgcgttggagcgcgcctgcggtgaagtcgaggatatttacgctctgcgtatcgtgcctgtgaccgtgggaaccgatgaagcgctgactgagaaaacgcaggcagcggtgatggcagtccgcgaagcactcgtgaacgtggccaagcatgccggcgtggaaaccgccgatgtgtacgccgaaattatgctcggcgaactgaacattttcgtccgcgaccgcggtgcaggattcgaccccgacaacatccccgacgggcaccacgggctcgccgaatccgtccaaggccgcgtcgaacgagccggcggaaaagtacgcatcaaatctgaaatcggcgaaggcaccgaagtggcaatcaccatggatgtgtagttggtcgtacgcgcgtgtct

SEQ ID NO: 304 - protein, 423 aa, Corynebacterium glutamicum
MGESPEKVAFRVFPDGLVSQGHDMIEDMSNTPAPYTPQPAGQAVPLYPTFTRSRDGRVVAGVASGLAKHLNVSVFWVRALLIFAALLSGAGLFAYALIWIFTRIEKKGSGEASTSKRWVSWCLVLLAIGGAAASVMLSTGFAVGTLVPIGVVGVGLLMVWLAYDRGVESGPNLLIIATGGVLMLVAIVLIVMNWNTQDGFVMALVAVVLTLVGVAALGVPLWVRMWDQLGEERAEKAAAAERADIASRLHDSVLQTLALIQKRADDPAEVARLARGQERELRQWLFDSQDKTPQTTGTVFTALERACGEVEDIYALRIVPVTVGTDEALTEKTQAAVMAVREALVNVAKHAGVETADVYAEIMLGELNIFVRDRGAGFDPDNIPDGHHGLAESVQGRVERAGGKVRIKSEIGEGTEVAITMDV

SEQ ID NO: 305 - DNA, 813 bp, Corynebacterium glutamicum
  CDS (101)..(790): RXS00471
acgcatcaaatctgaaatcggcgaaggcaccgaagtggcaatcaccatggatgtgtagttggtcgtacgcgcgtgtcttcggggctgtaacctgaaaggcatggttgatgtgtttttggtcgatgaccactccgtgtttcgctccggcgtcaaagcagaactaggcaacgccgtcacagtagtcggcgaagcagggacggtggccgacgccgtagccggcatcaaggcaagcaaaccagaggtagtgcttctcgacgtccacatgcccgacggcggcggcctcgcagtgctccagcagatcaacgactccgatgtggacaccattttcttggcactcagtgtctctgatgctgcggaagatgtcatcgccatcatccgtggcggtgccaggggatacgtgaccaaatcaatctccggtgaagaactcatcgaagccatcaaccgcgtgaaatccggcgacgcattcttctcaccacgcctggcaggctttgtcctcgacgccttcgccgcccccgattccgcagctggcgcaggcattgtcgacgcacccgaaaaagacgccgccgtagaatccggaaaaatcctcgacgacccagttgtcgacgccctcacccgccgcgaactcgaagtcctccgcctactagcccgcggctacacctacaaagaaatcggcaaagaactgttcatttccgtcaaaaccgtggaaacccacgcctcaaacattctgcggaaaacccaacaatccaaccgccacgcgttgacccggtgggctcactcgagggatcttgactaatggcggctaaaaagagtggc

SEQ ID NO: 306 - protein, 230 aa, Corynebacterium glutamicum
MVDVFLVDDHSVFRSGVKAELGNAVTVVGEAGTVADAVAGIKASKPEVVLLDVHMPDGGGLAVLQQINDSDVDTIFLALSVSDAAEDVIAIIRGGARGYVTKSISGEELIEAINRVKSGDAFFSPRLAGFVLDAFAAPDSAAGAGIVDAPEKDAAVESGKILDDPVVDALTRRELEVLRLLARGYTYKEIGKELFISVKTVETHASNILRKTQQSNRHALTRWAHSRDLD

SEQ ID NO: 307 - DNA, 708 bp, Corynebacterium glutamicum
  CDS (101)..(685): RXS00481
gtccataaaaataatgtgcctacaagaaatttatagtatcccatgagttaatatttttaaaaataaactttatctgactttgtagaaaaaggtgattactatgctgaatatgcaggaaccagataaaatccatccggcagaacctacacttcgtaatatttatgacgttaaaactagtgatcccaaaagtgaattagttgatcgttctggcatgtcggaagaagacattgcgcaaattgggcggctaatgaaatcgttggccagtcttcgcgatgtggaacgtagtattggtgaagcctcggcacgttatatggagctaagtgcccctgatatgcgagctttgcactatttgattgtggcgggcaatgcgggcgaagtggtgactccaggaatgcttggagctcaccttaagctttccccggcatctgtaacaaagacgcttaataggctagaaaaaggtgggcatattgttcgtaatgtgcaccccgtcgaccgcagggctttcgccctcatggtcactgatgccactcgtggagaggcgatgcggacgcttggtaagcatcaggcgcgtcgttttgatgctgctaaacgattaactccacaagagcgtgaagtggttatccgattccttcaggatatggcacaggagttatcccttaataatgcaccatggctcaacacggagtagatgaccatctacgttaatta

SEQ ID NO: 308 - protein, 195 aa, Corynebacterium glutamicum
MLNMQEPDKIHPAEPTLRNIYDVKTSDPKSELVDRSGMSEEDIAQIGRLMKSLASLRDVERSIGEASARYMELSAPDMRALHYLIVAGNAGEVVTPGMLGAHLKLSPASVTKTLNRLEKGGHIVRNVHPVDRRAFALMVTDATRGEAMRTLGKHQARRFDAAKRLTPQEREVVIRFLQDMAQELSLNNAPWLNTE

SEQ ID NO: 309 - DNA, 579 bp, Corynebacterium glutamicum
  CDS (101)..(556): RXS00649
gtatttgatctgtggtgtggctgattcgggaggactcgatgacattatgtgtatggtacacattttgtgcaagatgcaatagctggcaaactggagagccatgagcaccgaccccatcgcggccttggaatacgaatccaccatcttcgcccgtcaccggaatcaatacaccggccaagcaggtacgaatgctggcgtcctcgattccagcggctacaacctactcacgctgctccagttacgtggcccctccaccatcggcgaactcagcgccatcaccggcctagacgcatctacccttaaccgtcagacaaaagccctactaaccaaaggatttgtcgaacgcatcccagatcccgacggtggaatcgctcggaaattccaccccaccgacctcggcaatgaactgctcaacgaggaacgcacatccagccaagaaaaatatgccgagttactttcagactggcccgaagaggatctacgcaccttcgtcaaacttcttgaaaaactaaataaagccgtggagacacgcgtcggaaagcattggccgcgcccctgactcagcccaagccagagccc

SEQ ID NO: 310 - protein, 152 aa, Corynebacterium glutamicum
MSTDPIAALEYESTIFARHRNQYTGQAGTNAGVLDSSGYNLLTLLQLRGPSTIGELSAITGLDASTLNRQTKALLTKGFVERIPDPDGGIARKFHPTDLGNELLNEERTSSQEKYAELLSDWPEEDLRTFVKLLEKLNKAVETRVGKHWPRP

SEQ ID NO: 311 - DNA, 759 bp, Corynebacterium glutamicum
  CDS (101)..(736): RXS00650
aaggctagactaaagtacgattcatctgctcatcgatactcttgaaggcgcattttcattcgaaacgaagtgcgccattgggaaggacctagttcaaacaatgattcgcgtgctgcttgctgatgaccacgaaatcgtgaggctcggactccgagctgtgctggaaagcgccgaggacattgaagtggtgggcgaagtctccaccgccgaaggtgcggtgcaggcagcccaagaaggcggaatcgacgtcatcttgatggacctccgattcggccccggcgtccaaggaacccaggtttccacaggcgcagacgccaccgcagccatcaagcgaaacatcgataacccgccaaaagtcctggtcgtgaccaactacgacaccgacacagacatcctcggcgcaatcgaagccggcgcactgggctacctgctcaaagacgccccaccgagcgaactcctggcagcagtacgatccgcagcagaaggtgactccacactgtcacccatggttgcgaaccgcctgatgactcgcgtgcgcacccccaaaacctcactcaccccacgtgaactggaagttctcaagctggttgccggtggatcctccaaccgcgacattggccgtatcctcttcctctcagaagccacggtgaaatcccacctcgtgcacatctacgacaagctcggcgtgcggtcacgtacctccgctgtcgcagccgcacgtgagcaggggctgctgtagcgggggttgctgcaaggctt

SEQ ID NO: 312 - protein, 212 aa, Corynebacterium glutamicum
MIRVLLADDHEIVRLGLRAVLESAEDIEVVGEVSTAEGAVQAAQEGGIDVILMDLRFGPGVQGTQVSTGADATAAIKRNIDNPPKVLVVTNYDTDTDILGAIEAGALGYLLKDAPPSELLAAVRSAAEGDSTLSPMVANRLMTRVRTPKTSLTPRELEVLKLVAGGSSNRDIGRILFLSEATVKSHLVHIYDKLGVRSRTSAVAAAREQGLL

SEQ ID NO: 313 - DNA, 1026 bp, Corynebacterium glutamicum
  CDS (101)..(1003): RXS00657
gtgcggatcgggtatccgcgctacacttagaggtgttagagatcatgagtttccacgaactgtaacgcaggattcaccaatcaatgaaaggtcgaccgacatgagcactgaagacattgtcgtcgtagcagtagatggctcggacgcctcaaaacaagctgttcggtgggctgcaaataccgccaacaaacgtggcattccacttcgcttggcttccagctacaccatgcctcagttcctctacgcagagggaatggttccaccacaagagcttttcgatgacctccaggccgaagccctggaaaagattaacgaagcccgtgacatcgcccatgaggtagcgccagaaatcaagatcgggcacaccatcgctgaaggcagtcccatcgacatgctgttggaaatgtctcccgatgccacaatgatcgtcatgggttcccgcggactcggcggactctccggaatggtcatgggctccgtctccggtgcagtggtcagccacgcaaagtgtccagtcgttgttgtccgtgaagacagcgcagtcaacgaagacagcaagtacggcccagtcgtcgtcggtgtggatggctccgaagtctcccaacaggcaaccgaatacgcatttgcggaagctgaagctcgtggcgccgaactcgttgcagttcacacctggatggacatgcaggtacaggcatcacttgcaggtcttgcagctgctcaacagcagtgggatgaagtggaacgtcagcaaaccgacatgctgatcgaacgcctcgcaccactggtggaaaagtacccaagtgtaaccgtcaagaagatcatcacccgtgaccgcccagttcgcgcacttgcagaagcatctgaaaacgcgcagctcctagtcgttggttcccatggtcgtggcggatttaagggcatgctccttggctccacctcccgcgcactgctgcaatccgcaccgtgcccaatgatggtggttcgcccacctgagaagattaagaagtagtttcttttaagtttcgatgc

SEQ ID NO: 314 - protein, 301 aa, Corynebacterium glutamicum
MSTEDIVVVAVDGSDASKQAVRWAANTANKRGIPLRLASSYTMPQFLYAEGMVPPQELFDDLQAEALEKINEARDIAHEVAPEIKIGHTIAEGSPIDMLLEMSPDATMIVMGSRGLGGLSGMVMGSVSGAVVSHAKCPVVVVREDSAVNEDSKYGPVVVGVDGSEVSQQATEYAFAEAEARGAELVAVHTWMDMQVQASLAGLAAAQQQWDEVERQQTDMLIERLAPLVEKYPSVTVKKIITRDRPVRALAEASENAQLLVVGSHGRGGFKGMLLGSTSRALLQSAPCPMMVVRPPEKIKK

SEQ ID NO: 315 - DNA, 1752 bp, Corynebacterium glutamicum
  CDS (101)..(1729): RXS00719
cagatgatgcacacatcgtggacacctctgatatgaccatggatcaagtacttgatcacctcatccacctagtggaagcctccgctgaaaggagcaaccagtgactgataaacacaccatgcctggtgaagaggacgacaccgtattcgtctaccacacccacaaaggcgaaatggacgtcgaaggtgcgtttgctgacgaagaagaactagcaccacacggcggttgggcttccgcagatttcgacccagcagaattcggctacgaagactctgacgatgacttcgatgcagaggactttgacgaaacagagttctccaaccctgatttcggcgaagactactctgatgaagactgggaagaaatcgagaccgcattcggattcgacccaagccaccttgaagaagctctctgcacggtcgctatcgtcggacgcccaaatgttggtaaatcaaccttggtgaaccgctttattggacgtcgagaagcagtcgtggaagatttccccggcgtaacccgtgaccgcatctcctacatctctgactggggtggacaccgtttctgggttcaggacacaggcggatgggatcctaacgtcaagggcatccacgcatcgatcgcacagcaagcagaagttgctatgagcactgccgatgtcatcgtattcgtcgtggacaccaaggtgggcatcaccgaaactgactcagtgatggcagcaaaactgttgcgctcggaagtgccagtgatcttggttgcgaacaaattcgactccgacagccagtgggctgacatggctgagttctacagcctcggccttggcgatccatacccagtttcagcccagcatggacgtggtggcgctgacgttttggacaaagtccttgaactcttcccagaagagcctcgctccaagtccatcgtggaaggccctcgtcgtgtcgcccttgtgggtaagccaaacgtgggtaagtcttcactgctcaacaagtttgctggcgagacccgctctgtcgtggacaatgttgcaggaaccaccgttgaccccgttgactccctgattcagctggatcaaaaactgtggaaattcgtggatactgctggtcttcgcaaaaaggtcaagactgcatctggccacgagtactacgcatcactgcgtacccacggtgccatcgatgcagctgagctgtgtgttttgcttatcgattcctccgaacccatcaccgagcaggatcagcgcgtgctcgcaatgatcaccgatgccggtaaggcactggttattgcgttcaacaagtgggatctcatggatgaagatcgccgcatcgatttggatcgcgaacttgatctccagttggcacacgtgccttgggcaaagcgcatcaacatctccgccaaaaccggtcgtgcactgcagcgcctcgagccagcaatgttggaagcgctcgacaactgggatcgccgtatctccactggtcagctgaacacctggctgcgtgaagcaattgctgcgaacccaccaccaatgcgtggcggacgtttgcctcgagtgctgtttgccacccaggcatctactcagccaccagtgatcgtactgttcaccaccggcttcctcgaagcaggttaccgacgatacctggagcgcaagttccgtgaacgtttcggctttgaaggcactccagtgcgaatcgctgtgcgtgttcgcgagcgccgcggcaagggcggaaacaagcagtaaagcttgattttccctaaaag

SEQ ID NO: 316 - protein, 543 aa, Corynebacterium glutamicum
VTDKHTMPGEEDDTVFVYHTHKGEMDVEGAFADEEELAPHGGWASADFDPAEFGYEDSDDDFDAEDFDETEFSNPDFGEDYSDEDWEEIETAFGFDPSHLEEALCTVAIVGRPNVGKSTLVNRFIGRREAVVEDFPGVTRDRISYISDWGGHRFWVQDTGGWDPNVKGIHASIAQQAEVAMSTADVIVFVVDTKVGITETDSVMAAKLLRSEVPVILVANKFDSDSQWADMAEFYSLGLGDPYPVSAQHGRGGADVLDKVLELFPEEPRSKSIVEGPRRVALVGKPNVGKSSLLNKFAGETRSVVDNVAGTTVDPVDSLIQLDQKLWKFVDTAGLRKKVKTASGHEYYASLRTHGAIDAAELCVLLIDSSEPITEQDQRVLAMITDAGKALVIAFNKWDLMDEDRRIDLDRELDLQLAHVPWAKRINISAKTGRALQRLEPAMLEALDNWDRRISTGQLNTWLREAIAANPPPMRGGRLPRVLFATQASTQPPVIVLFTTGFLEAGYRRYLERKFRERFGFEGTPVRIAVRVRERRGKGGNKQ

SEQ ID NO: 317 - DNA, 386 bp, Corynebacterium glutamicum
  CDS (1)..(363): RXS00738
tgtcaagaggagacggatggcttttttgattttgggcgcgatatgcggcccggtgagcgccggtcgtatggcactttgcttaacgacgccacgacgcaggtgtcgcacatcctcggcaatgccttcacccgatctgggctcaacgctgagtacgcgaatctttatggtcaggcgttggtgggcatggtgtcgatgacggcgcaatggtggttggatgagcgcactccgccgaaggaagaagttgccgcacatattgttaatctttgttggaatggtttgacggggatggaagccgatccgaagttaactcccatcagttctgctgagggtgcgatttttggtcaagaaaaggagagtgaagcgtgacacctatgctcgcggggctg

SEQ ID NO: 318 - protein, 121 aa, Corynebacterium glutamicum
CQEETDGFFDFGRDMRPGERRSYGTLLNDATTQVSHILGNAFTRSGLNAEYANLYGQALVGMVSMTAQWWLDERTPPKEEVAAHIVNLCWNGLTGMEADPKLTPISSAEGAIFGQEKESEA

SEQ ID NO: 319 - DNA, 783 bp, Corynebacterium glutamicum
  CDS (101)..(760): RXS01082
ggccttgcttgcgttagttgcagtgcttcctgaatatgcttctgaaacggttgtcgagcacacttatcaaacatcggcggcgaattaagaaggtgaacagttgacgcagtggggtaattcgaatgttgtggaggactatctcacagcacttttccgtgcagaagaatgggatgaggaaccaacaacaggaaaactcgctgaagtaattggagttaccgcatcaacggtgtcggcgacgctcaaaaaactcaaccctgagggcttcgtcaattaccgtccctacggggacatcgagctgacgcccgcaggtcgagacatcgccatcaacgtgatcaggcggcgccggatcattgagacctatctgtctgagaagcttggattaggcgctcatgaactacacggcgaggcagatttattagagcacgcagtgtctccactggtgttggagaagatgtttcaggcagtgggctatccaacgttggatcctcacggggatcccatccccaccgaatctggggagatgaccatcaatgatggactcatgcttttgggactaaaagctggcgcatctgccacggttacacgtgttagggacggaaacccatcagtggttcggtacctcactggagtgggaattaccgtgggcacaacggtcacggtcgttgaagctcttagcgatattgccacactgcgcctgcagatcggggaaatgtttcaagacattccccttgcagtggcaaacgcagtgcgcgtatcacgttagttcagcgtgcccagcgcgct

SEQ ID NO: 320 - protein, 220 aa, Corynebacterium glutamicum
LTQWGNSNVVEDYLTALFRAEEWDEEPTTGKLAEVIGVTASTVSATLKKLNPEGFVNYRPYGDIELTPAGRDIAINVIRRRRIIETYLSEKLGLGAHELHGEADLLEHAVSPLVLEKMFQAVGYPTLDPHGDPIPTESGEMTINDGLMLLGLKAGASATVTRVRDGNPSVVRYLTGVGITVGTTVTVVEALSDIATLRLQIGEMFQDIPLAVANAVRVSR

SEQ ID NO: 321 - DNA, 570 bp, Corynebacterium glutamicum
  CDS (101)..(547): RXS01123
aaagagcagtgatttttcccgatccccccctggccgcctagcggaaattattgataccgcgtggcggttggtggaaacacgtggctgggcgaatgtgagcatgcgaaccctggccgcggagctaaatatcaaggcgccgtcgctgtacaagcatgtaaaaacgcgcgaggatatcgccgcacacatcgccacgaaggcatttattcagctggggcaaagcctgcatgaacattgtgaaagtgtggaggatttgcttgcggaataccgctccatggctcgggaaaatccaaatatttaccggcttctcaccagttcagagttcccccgcgagctacttccagaaggcctagaaacttgggcaggaacgccattctacctggtcaccggccacgatccgatcaagggtcaagcactgtgggcattcgcgcacggcatggccatcctggaaatcgacgcccgattcgccggccccaacaatggatcccccgcggatggcgtgtgggagatcggcgcgcgggcatttgacacacaagtattcgaccaaggctgagcaaaaaggcgctaagctgt

SEQ ID NO: 322 - protein, 149 aa, Corynebacterium glutamicum
MRTLAAELNIKAPSLYKHVKTREDIAAHIATKAFIQLGQSLHEHCESVEDLLAEYRSMARENPNIYRLLTSSEFPRELLPEGLETWAGTPFYLVTGHDPIKGQALWAFAHGMAILEIDARFAGPNNGSPADGVWEIGARAFDTQVFDQG

SEQ ID NO: 323 - DNA, 732 bp, Corynebacterium glutamicum
  CDS (101)..(709): RXS01189
agccggaatgacgctcattgtgtcccgcgaagacgaccagttcagcgtccgcatgctcattaatgcacctgcaaatacacctgcagaaaaggaagcttaaatgatttccatttccatcgccgacgacgaagccctgatcgcaagctccctggcaaccttgctcagcttggaacccgatttagacgtccgacctaccgcaggatccggtgaagaactcattgaaacgtgggcggatccaagcaaccgaaccgatgtatgcgtccttgaccttcaactcggaggcatcgacggcatcgacaccgccacccggctcatggaaaccaccccagatttggccgtgctcatcgtgaccagccacgccaggccccgacaactcaaacgcgcgcttgcagcaggtgttttaggattcttgcccaaaacatccaccgcagatgaattcgccaccgcaatccgcaccgttcacgctggacgacgctacatcgaccccgaactagccgccatgacgatcagcgccggtgaatccccattaaccaaccgtgaagaagaagtcctcgaactagcaggccaaggactaagcgccgaagaaattgcggtggcagcgcacctcgcgccgggaaccacccgcaactatttatcccaagctatgacaaaagtaggcgcgcagaatcgctttgaagcgttcacgcgcgccagggaattgggctggttgtagcttgtggcttatctcctatt

SEQ ID NO: 324 - protein, 203 aa, Corynebacterium glutamicum
MISISIADDEALIASSLATLLSLEPDLDVRPTAGSGEELIETWADPSNRTDVCVLDLQLGGIDGIDTATRLMETTPDLAVLIVTSHARPRQLKRALAAGVLGFLPKTSTADEFATAIRTVHAGRRYIDPELAAMTISAGESPLTNREEEVLELAGQGLSAEEIAVAAHLAPGTTRNYLSQAMTKVGAQNRFEAFTRARELGWL

SEQ ID NO: 325 - DNA, 900 bp, Corynebacterium glutamicum
  CDS (101)..(877): RXS01242
cgccggcaaccaaatgaggcttttgggcgttggacagtgagacaatgggtaagaaattcggacatatttagtaaattggctttttgctttaaggagtgacatgtacgcagaggagcgccgtcgacagattgcctcattaacggcagttgagggacgtgtaaatgtcacagaattagcgggccgattcgatgtcactgcagagacgattcgacgagaccttgcggtgctagaccgcgagggaattgttcaccgcgttcacggtggcgcagtagccacccaatctttccaaaccacagagttgagcttggatactcgtttcaggtctgcatcgtcagcaaagtactccattgccaaggcagcgatgcagttcctgcccgctgagcatggcggactgttcctcgatgcgggaactactgttactgctttggccgatctcatttctgagcatcctagctccaagcagtggtcgatcgtgaccaactgcctccccatcgcacttaatctggccaacgccgggcttgatgatgtccagctgcttggaggaagcgttcgcgcgatcacccaggctgttgtgggtgacactgcgcttcgtactctcgcgctgatgcgtgcggatgtagtgttcatcggcaccaacgcgttgacgttggatcacggattgtctacggccgattcccaagaggctgccatgaaatctgcgatgatcaccaacgcccacaaggtggtggtgttgtgtgactccaccaagatgggcaccgactacctcgtgagctttggcgcaatcagcgatatcgatgtggtggtcaccgatgcgggtgcaccagcaagtttcgttgagcagttgcgagaacgcgatgtagaagttgtgattgcagaatgattcttacagtcactgcaagt

SEQ ID NO: 326 - protein, 259 aa, Corynebacterium glutamicum
MYAEERRRQIASLTAVEGRVNVTELAGRFDVTAETIRRDLAVLDREGIVHRVHGGAVATQSFQTTELSLDTRFRSASSAKYSIAKAAMQFLPAEHGGLFLDAGTTVTALADLISEHPSSKQWSIVTNCLPIALNLANAGLDDVQLLGGSVRAITQAVVGDTALRTLALMRADVVFIGTNALTLDHGLSTADSQEAAMKSAMITNAHKVVVLCDSTKMGTDYLVSFGAISDIDVVVTDAGAPASFVEQLRERDVEVVIAE

SEQ ID NO: 327 - DNA, 753 bp, Corynebacterium glutamicum
  CDS (101)..(730): RXS01607
gggctgaagggctgggcggaacaataattattgaatctacaatcggatcgggaactggaatttccgcccgttttccctatccacaaaaggaccaagataagtgatccgtattctgttggctgatgatcatcccgttgttcgcgcaggccttgcctccttgctggtgagtgaagatgattttgagatagtggacatggtgggcaccccagatgatgccgttgcgcgcgccgcggaaggcggggtggatgtggtgttgatggatctgcgttttggtgatcaaccaggcatcgaggtcgccggcggggtagaggcaacgcgtcgcatccgtgcgctggacaacccgccacaggtactggtggtgaccaactactccacagacggcgatgtggtgggcgcagtatctgctggtgccgtggggtatttgctcaaagatagctccccagaagatctcattgccggtgttcgcgatgccgcgcggggagaatcagtgctttcaaagcaggtcgccagcaagatcatggggcggatgaacaaccccatgactgctctcagtgccagagaaattgaagtgctgtccttggtggcgcaagggcaaagcaatagagaaatcggcaagaaacttttcctcactgaggccacggtgaaaagtcacatggggcatgtgttcaacaagctggatgtcacctctagaacagctgcggtagctgaagccagacagcgcggaattatctagacgcacacgtgttggtaacc

SEQ ID NO: 328 - protein, 210 aa, Corynebacterium glutamicum
VIRILLADDHPVVRAGLASLLVSEDDFEIVDMVGTPDDAVARAAEGGVDVVLMDLRFGDQPGIEVAGGVEATRRIRALDNPPQVLVVTNYSTDGDVVGAVSAGAVGYLLKDSSPEDLIAGVRDAARGESVLSKQVASKIMGRMNNPMTALSAREIEVLSLVAQGQSNREIGKKLFLTEATVKSHMGHVFNKLDVTSRTAAVAEARQRGII

SEQ ID NO: 329 - DNA, 1017 bp, Corynebacterium glutamicum
  CDS (101)..(994): RXS01674
cggcgtcgattccagaaggtttgtagacatgcttcaaggttgcgctaattgaaaagaacgcggtagacggtactttcatatccacccatataatgttgatatggataatgggtggccgaacctgcaaactctcgcactctttgtggcgattgtggaagaggggagcctcggtgccggtgctcgaaaagtcggaatggcccaacctaatgccagtcgggctatcgcagagcttgaggcagacatgaaagccgaattgttggtacgtcatcctcgaggatcacatccaacagctgctggacttgcgcttgttgagcattcgcgcgatctgcttcaatctgtacaagaatttactgaatgggtgacagagggacgaactgagcagccgctgaaattgcatgttggggccagtatgaccattgccgaggctctacttccagcttgggttgcggacatgcgcacgcgttttcctgcctgccgtgtcgacgtctctgtgatgaattcttctcaagtaattgaagccgtccagaaagggcacttgcaactaggttttattgaaacaccgcatgttcccgtacggcttcatgctcgtgtggtgcaagaggacaagctgattgtggtgatttctcctaatcatgagtgggctaatcgcacgggtaggatcagtcttcgggagttgtcggaaactccgctgatagtgagggaagtcggctcaggtacccgagaagcattacaagaattacttgcggattatgacatggctgagccgattcaagtgttaaacagcaatgctgcggtacgtgttgttgttgaagcaggggcaggtcctgcagtacttggtgaattagccttgcgtgatcatcttgcgctcggcaggctgttgagtgtgccatttgaaggcagtggagttactcgtcctcttacagctgtgtggagtggaccccgcagattgccgattctagcgggagaattagtgtccatcgcatcgaaccacatctgattttgagccctggctaacgg

SEQ ID NO: 330 - protein, 298 aa, Corynebacterium glutamicum
MDNGWPNLQTLALFVAIVEEGSLGAGARKVGMAQPNASRAIAELEADMKAELLVRHPRGSHPTAAGLALVEHSRDLLQSVQEFTEWVTEGRTEQPLKLHVGASMTIAEALLPAWVADMRTRFPACRVDVSVMNSSQVIEAVQKGHLQLGFIETPHVPVRLHARVVQEDKLIVVISPNHEWANRTGRISLRELSETPLIVREVGSGTREALQELLADYDMAEPIQVLNSNAAVRVVVEAGAGPAVLGELALRDHLALGRLLSVPFEGSGVTRPLTAVWSGPRRLPILAGELVSIASNHI

SEQ ID NO: 331 - DNA, 928 bp, Corynebacterium glutamicum
  CDS (101)..(928): RXS01872
attgcttggctcatggagttcatcatgcgccaacagcaaatattagtaaaatgttagaaatagctgtttttgattcactttgtgcatgtaggctgtgaccatgggcaacgacggcggagacctgcgaatcgacgacctacgcagcttcatttcagtcgctcaatcaggccacctaaccgaaactgcccaaagattaggcatcccgcagcccacactttccagacgaatcagccgagtggaaaaacacgcaggcaccccacttttcgaccgcgccggccgcaaactcgtcctcaaccaacgaggccacgccttcctcaaccacgccagcgccatcgtcgcagaattcaactccgccgcaactgaaatcaaacgcctcatggacccagaaaaaggcacaatccgactggacttcatgcattccttgggcacttggatggtccccgaacttatccgaacattccgcgccgaacaccccaacgtagaattccaactccaccaagcggcagcaatgctcctggtagatcgtgttttggctgatgaaactgacctcgcattagttggccccaaacctgccgaggttggtacctctttagggtgggcgccactgcttcgtcaacgacttgccctagctgttcccgcagatcaccggcttgcctccttttctggccaaggagaattgccgttgattactgcggcggaagaacctttcgtggcgatgcgagcaggtttcggcacccgactcctcatggatgcattagccgaagaagccggttttgttcccaatgtggttttcgaatccatggaactcaccaccgtcgcagggcttgtcagcgcaggtctcggcgttggtgtggttccgatggatgatccctacctttccacagtgggaatcgtgcaacgcccacttagtccacccgcttatagggaa

SEQ ID NO: 332 - protein, 276 aa, Corynebacterium glutamicum
MGNDGGDLRIDDLRSFISVAQSGHLTETAQRLGIPQPTLSRRISRVEKHAGTPLFDRAGRKLVLNQRGHAFLNHASAIVAEFNSAATEIKRLMDPEKGTIRLDFMHSLGTWMVPELIRTFRAEHPNVEFQLHQAAAMLLVDRVLADETDLALVGPKPAEVGTSLGWAPLLRQRLALAVPADHRLASFSGQGELPLITAAEEPFVAMRAGFGTRLLMDALAEEAGFVPNVVFESMELTTVAGLVSAGLGVGVVPMDDPYLSTVGIVQRPLSPPAYRE

SEQ ID NO: 333 - DNA, 597 bp, Corynebacterium glutamicum
  CDS (101)..(574): RXS02117
tgaacacaaactaccacgtttattgcatcatgcaacacccttgctaggatataaaatactctatgagtccagacgtttttaaagggagcgaattaccatagtgtctacagatccagaagagttcgaccaagctgaaaccctcgatcaactcgcgtatgagatcatcctgctcacccggtatggtgtccaaaacacaccgaccaacaagcgcgaagccatcatggatcgcagcgccctcatcttgctcacccgccttgacgctcaaggacctatgacagttaatgagctagctgaaagctttggacttaacgtttctaccgtgcaccgccaactcaaagcagccattgccaatggcttaattgaagtcgtcgatgatcaagcatgccccgctaaacttcatcgtccaactgagttgggtaaagaaaaactgcagcaggagcttcttgcccgccagcaggatctcacccgcattcttcatgattgggatgaggaagacattaaaacgcatgccaagctattgcggaagcacaatgaaagcttggaagaatacctcgatatgaagtggccccgcccctaagtgcccataaacgcacctct

SEQ ID NO: 334 - protein, 158 aa, Corynebacterium glutamicum
VSTDPEEFDQAETLDQLAYEIILLTRYGVQNTPTNKREAIMDRSALILLTRLDAQGPMTVNELAESFGLNVSTVHRQLKAAIANGLIEVVDDQACPAKLHRPTELGKEKLQQELLARQQDLTRILHDWDEEDIKTHAKLLRKHNESLEEYLDMKWPRP

SEQ ID NO: 335 - DNA, 969 bp, Corynebacterium glutamicum
  CDS (101)..(946): RXS02288
aacaacaatctaacgccatcatgttataaaaaagcaagacctaacataaaaatgttagaaagtgctggatctaacaacatttccgtggtaactttttcacatgtcccaagtgattcccgccagctcacaagaaaagcgtcgtgagcgcatcgtttcttatgtcacccgtcatggattcgctcgtgttgaagcattagctgagctttttgaggtcagcgcaatgaccattcaccgtgatttggaggcgctggctgcagacaatttggtggagcgcattaggggtggcgcgcgttcggtgtcgccgtcgatgagtgagttggcagtggagcagcgtcggcatttgcatcgcactgttaaagaggcgttgtgtactgcagcagcacggttgattccggagggcgctgtggtggcgattgatgattccaccacgttggagtctttggttgagaagttgccgcagcggtcaccatcggcgttgattacgcattctttgaagacaatggcggatcatcgtgtgcgcgccgggatgagcgatatccgtttgattgcgtgtgcgggattgtatttcgcggagactgattctttcttgggcaaggcaacttcagcgcagttgaatgagctgtcggcggatatttcttttgtttctacgactgcggtgcgcgctacgggggaggttccggcgctgtttcatcctgatatggaggctgctgatacgaagcgggcgttgattgggattggtagcgtgcgtgtgttggtggtggattctagtaaatttggttcggctggtgtgttcaaggttgcttcgattgaggagtttgaccacatcatcattgatcagcagtgcacccgtgagcagcgggatcttttgcgtaattcgcgcgcgcagatccatgtgattgaccacaatggtgatgaaattttggataccccaacggaagaggatttttaagatggctttggttcttggaa

SEQ ID NO: 336 - protein, 282 aa, Corynebacterium glutamicum
MSQVIPASSQEKRRERIVSYVTRHGFARVEALAELFEVSAMTIHRDLEALAADNLVERIRGGARSVSPSMSELAVEQRRHLHRTVKEALCTAAARLIPEGAVVAIDDSTTLESLVEKLPQRSPSALITHSLKTMADHRVRAGMSDIRLIACAGLYFAETDSFLGKATSAQLNELSADISFVSTTAVRATGEVPALFHPDMEAADTKRALIGIGSVRVLVVDSSKFGSAGVFKVASIEEFDHIIIDQQCTREQRDLLRNSRAQIHVIDHNGDEILDTPTEEDF

SEQ ID NO: 337 - DNA, 567 bp, Corynebacterium glutamicum
  CDS (101)..(544): RXS02573
cttccacacggctctaactataggaaaagacggcagcaaagcattaatcgtcggtaggctgaagtgaagtactttccgaaagattcacagggagcatgcaatgacgaacaaaaccatgctggttgcttttgatggctcaccggaatcccggcgcgctttggaatatgcggcgaaattgttgcagccgcgcaccgtggaaattttaactgcgtgggagccattgcatcggcaagctgcgcgctcggtttcgttgatcaccttgggggtggaacccgaagaccccgcccattccgctgcactaaaaacctgccaggaaggcgtagagctagcccaatctctaggtctggaagcgcgagcccacatggtggaatccgcaacggccgtgtggagcgccatcgttgatgctgctgacgagctccgccccgacgtgattgtcaccggcacccgcgggatctccggatggaaatccctgtggcaatcctccacctcagacagcgtgctccaccacgccgacgtaccagtttttgtcgttccacccctggactaaaaccgagacgagaaccaaga

SEQ ID NO: 338 - protein, 148 aa, Corynebacterium glutamicum
MTNKTMLVAFDGSPESRRALEYAAKLLQPRTVEILTAWEPLHRQAARSVSLITLGVEPEDPAHSAALKTCQEGVELAQSLGLEARAHMVESATAVWSAIVDAADELRPDVIVTGTRGISGWKSLWQSSTSDSVLHHADVPVFVVPPLD

SEQ ID NO: 339 - DNA, 866 bp, Corynebacterium glutamicum
  CDS (1)..(843): RXS02627
gatgtcactgtggaaagccaaccagaacgcgtcgttgccctgggttggggagatgctgaggctgcgctggaattcggtgtgcagcctgtgggtgcatcagattggctcgcattcggtggtgaaggcgtgggaccgtggattgaggattctgcctacgatgaagcgccagaaataatcggaaccatggaaccggagtatgaaaagattgcagcgcttgaaccggatctgattttggacgtgcgcagctctggcgaccaggaacgctatgacaagttgtcttcaatcgcactgaccatcggcgttccagaaggtggcgatagctacctcaccccacgcgctgagcaggtaaccatgatcgccactgctctggggcaggctgaacgtggtgaagaagtgaacgctgaatacgagcagctcactgctgatattcgtgcagctcacccgggctggcctgagaagaccgcggctgctgtatctgcaacggcaaccagctggggtgcatacatcaagggctccaaccgtgtagatactttgctggacctgggcttccaggaaaaccctgagctggctaaacagcaacctggcgatacgggtttctccatcaaattcagtgaagagactttcggcgttgtggattccgacctggttgtcggctttgccatcggtatgactcctgaggaaatggcagagcaggttccatggcagatgttgaccgccactcgtgacggccgttcctttgtgatgccccgtgagatttccaatgcgttttctttgggttccccgcagtccactcggttcgcgttagacgccttggtgccacttctggaggagcatgcaggggagtagtggtccggtggtgcgggcag

SEQ ID NO: 340 - protein, 281 aa, Corynebacterium glutamicum
DVTVESQPERVVALGWGDAEAALEFGVQPVGASDWLAFGGEGVGPWIEDSAYDEAPEIIGTMEPEYEKIAALEPDLILDVRSSGDQERYDKLSSIALTIGVPEGGDSYLTPRAEQVTMIATALGQAERGEEVNAEYEQLTADIRAAHPGWPEKTAAAVSATATSWGAYIKGSNRVDTLLDLGFQENPELAKQQPGDTGFSIKFSEETFGVVDSDLVVGFAIGMTPEEMAEQVPWQMLTATRDGRSFVMPREISNAFSLGSPQSTRFALDALVPLLEEHAGE

SEQ ID NO: 341 - DNA, 930 bp, Corynebacterium glutamicum
  CDS (101)..(907): RXS02691
cttagggcttatctgttttccagccttgctttttactaggcgctcctgtcccgcttcagtcaccaaaaccacacccctggttatgaccagatcggctaaaatgaacaccatgcctgaccaaccgctcaaccaggacggattccctaccgcatccaaaggggtggaacccgacaacctccccgaccgcgttctcgtggacggccttaaaccaaagcatcagcagcttcgtgaaattttggaggaaatctgcaccacccagcttcagcctggggacatgctgcctggtgagcgcatcctggaagaaaagtatggcgtcagccgaattacggttcgtcgggcgattggtgatctggtcgcgtccggcaggttgaagcgagctcgcggcaaaggtaccttcgtggcccactcgccgttgatttcccgcctgcatttggcctcgttttccgcagagatggccgcccagaagctatcggctaccagcaggattttgagttcttcccgcggtcccgccccagatgatattgctgatttctttggtaccgatcgcgcggcccagcacatcacgttgcgccgcctgcgctttggaaatggtcgaccctatgccattgacaacggttggtacaactccgaattcgcacctgacctgctggaaaatgatgtgtacaactccgtgtactccatcctggaccgcgtctatggcgtccccgtcacccaggccgagcaaacggtcaccgccgtagcagccgacgaagacaccgcacggcttctggacgtcacccccggcgccccactccttcgtatccttcgacagtcactttctggcgataagcccgtggaatggtgcgtttccttgtaccgaaccgaccgatattctttaaaaacattggttacacgctccgaagatctctgacgtgaacccattttggtggc

SEQ ID NO: 342 - protein, 269 aa, Corynebacterium glutamicum
MNTMPDQPLNQDGFPTASKGVEPDNLPDRVLVDGLKPKHQQLREILEEICTTQLQPGDMLPGERILEEKYGVSRITVRRAIGDLVASGRLKRARGKGTFVAHSPLISRLHLASFSAEMAAQKLSATSRILSSSRGPAPDDIADFFGTDRAAQHITLRRLRFGNGRPYAIDNGWYNSEFAPDLLENDVYNSVYSILDRVYGVPVTQAEQTVTAVAADEDTARLLDVTPGAPLLRILRQSLSGDKPVEWCVSLYRTDRYSLKTLVTRSEDL

SEQ ID NO: 343 - DNA, 1161 bp, Corynebacterium glutamicum
  CDS (101)..(1138): RXS02730
ccaacatcgccttgcacgtaataggttaaaacacaagtgaatgtaatcgtttgcagcaatcgattacataaaggtagataatgagataaagcgaggcgctatggcgacggaaaaattccgaccgactcttaaagatgtcgctcgtcaagcaggtgtctccatcgccacagcatcacgagcactagcggataatccggcggttgctgcatcgactcgtgaaagaatccaacaattagcctctgatctgggttaccgggccaatgctcaagctcgtgcgcttcgcagttctcgcagcaacaccattggtgtgattgttcccagtttgattaaccattacttcgccgcaatggttactgaaattcaaagcaccgccagcaaagctggacttgccacgattatcaccaacagcaatgaagatgcgaccactatgtctgggtctttggagtttctcacctcgcatggtgtcgatggaatcatctgcgtacctaatgaggaatgcgcgaatcaactagaggacttgcagaagcaaggaatgccagtggtgttggttgaccgagagcttccaggagactccaccatcccaacggcgacctctaacccccaaccaggaatcgccgcagcagtagaactcctggctcacaacaacgcgttgccgattggttacctctcaggtcccatggacacctcaacaggtagagagcgattagaggatttcaaagcagcctgcgccaactccaaaattggcgaacagctcgtttttctgggtgggtacgaacaaagcgttggatttgaaggcgctacgaaattgctcgatcaaggagctaaaactctttttgccggcgattctatgatgacgatcggtgtcattgaagcctgccataaggctggtttggttatcggcaaggatgtcagcgtgattggttttgatacacatccgctttttgccctgcaacctcatccgttgacagtgattgatcaaaatgtagaacaactagcccaacgagcagtgtctatcctcaccgaattaattgcaggcacggtacctagcgtgacgaaaactacgatccccactgcccttattcatcgtgaatcaatcatcaactccactttaaggaagaaggatggactccccaatgagtaactcaaccggtaccgacattg

SEQ ID NO: 344 - protein, 346 aa, Corynebacterium glutamicum
MATEKFRPTLKDVARQAGVSIATASRALADNPAVAASTRERIQQLASDLGYRANAQARALRSSRSNTIGVIVPSLINHYFAAMVTEIQSTASKAGLATIITNSNEDATTMSGSLEFLTSHGVDGIICVPNEECANQLEDLQKQGMPVVLVDRELPGDSTIPTATSNPQPGIAAAVELLAHNNALPIGYLSGPMDTSTGRERLEDFKAACANSKIGEQLVFLGGYEQSVGFEGATKLLDQGAKTLFAGDSMMTIGVIEACHKAGLVIGKDVSVIGFDTHPLFALQPHPLTVIDQNVEQLAQRAVSILTELIAGTVPSVTKTTIPTALIHRESIINSTLRKKDGLPNE

SEQ ID NO: 345 - DNA, 606 bp, Corynebacterium glutamicum
  CDS (1)..(606): RXS02818
tcctattcccggaagtttttgacccaggtgtggattcgagacaatgtcggcgattataaaggccttaccgatacggcgttccgtaagaagctgcagcgcgatcttgcctacctgcgcagagttggcgttccgattgagcagttcacggtcacctcaggcatagctgaaggccagcaggcgtaccgtctggcccaggattcttataagctccccgaggtcgaattcaccccagatgaggccgccgtgctgggcatggcaggggagatgggccataatcaggaactcggcgccttcgcgcgttcggggtggaccaaattggcggccggcggcgcgcagcgtgatctgtccacgtccacagccttgaccaatgcgggcgatttaggttccttgtctgcaaaaaccctcgatgcgatcatcaaagcccgccaattgggcaagcaaatcagcttcgaataccggcgcgcccccaaagacgccccctcgcttcgacacatggatccttggggtctggtccctgagcgcgaccgcatctacctggtcggattcgacctcgaccgccaagaagcacgcaccttccgcatcacccgcgtccgcaacatcaaactc

SEQ ID NO: 346 - protein, 202 aa, Corynebacterium glutamicum
SYSRKFLTQVWIRDNVGDYKGLTDTAFRKKLQRDLAYLRRVGVPIEQFTVTSGIAEGQQAYRLAQDSYKLPEVEFTPDEAAVLGMAGEMGHNQELGAFARSGWTKLAAGGAQRDLSTSTALTNAGDLGSLSAKTLDAIIKARQLGKQISFEYRRAPKDAPSLRHMDPWGLVPERDRIYLVGFDLDRQEARTFRITRVRNIKL

SEQ ID NO: 347 - DNA, 582 bp, Corynebacterium glutamicum
  CDS (101)..(559): RXS02911
accgcatacattaacgtgttgatcattgccctagtatgcgcagtagcggctgctctgatcagcagttaccttttccgcggaaatccgaagggagccaataatgcgcactagtaaaaaagagatgattctgcgcacggccatcgattatatcggcgagtacagcctcgagacgctgagttacgattcgctcgccgaggcgaccggtctgtccaagtcgggcttgatttatcatttccccagccgccatgcgctgcttttaggcatgcacgagttgcttgccgacgactgggacaaggaattgcgcgacataacccgcgacccagaggatccacttgagcgattgcgcgccgtcgtggttacgcttgctgaaaacgtttcgcgccccgagctggttttgcttatggacgccccctcccacccgggatttcttaacgcctggcgcactgtaaatcatcaatggatccccgacaccgatgatctggaaaacgatgcccacaaacgcgccgtctactctggtgcagctcgcagccgatggcctcttcgtgcacgattacattcatgatgatgtcctcagcaagtcca

SEQ ID NO: 348 - protein, 153 aa, Corynebacterium glutamicum
MRTSKKEMILRTAIDYIGEYSLETLSYDSLAEATGLSKSGLIYHFPSRHALLLGMHELLADDWDKELRDITRDPEDPLERLRAVVVTLAENVSRPELVLLMDAPSHPGFLNAWRTVNHQWIPDTDDLENDAHKRAVYSGAARSRWPLRARLHS

SEQ ID NO: 349 - DNA, 786 bp, Corynebacterium glutamicum
  CDS (101)..(763): RXS03066
aactgttggcatggcgaagtacaatgttcgtgcaactggtcacgtggagcgcatcgtccgcgaaatcaccgcggcgtaatagcaccagcttaaaaaccttatgacatcagacaaagacactgaacaattggaagcggcaggcactgaaattttaatgcctcgccgccgtccggcacagcagcgcagtcgtgaacgattcaatcgaatcctcaccgctgcgcgttcagtgcttgtcgatctaggttttgaatcgttcacgtttgatgaagtcgctaagcgtgcagaggtaccgatcggcacgctgtaccaattctttgccaataagtatgtattgatctgcgaattggatcgtgtggataccgcagaagctgtcgcggagttgaagaaattctccgatcaggttcctgcgttgcagtggccggatatccttgatgaattcattgagcacttggctaggctctggcgcgatgatccgtctcggcgggccgtgtggcatgccatccagtccacgccggcaactcgtgcgacagctgcggcgacggaaaaagagatgctggaaatcatcgcggaagttatgcgcccgcttgcccgcggtgccggctacgaggagcgcatgtcactggcgggattgctggtgcacacggtaagttccctgcttaactatgccgtgcgtgatgtcaatagttccgaagaggatttcgacagcatcgtggaagaaataaaacgaatgctgatttcttacctcttctccgtggctactggatagtcaacacgcacgttccaccg

SEQ ID NO: 350 - protein, 221 aa, Corynebacterium glutamicum
MTSDKDTEQLEAAGTEILMPRRRPAQQRSRERFNRILTAARSVLVDLGFESFTFDEVAKRAEVPIGTLYQFFANKYVLICELDRVDTAEAVAELKKFSDQVPALQWPDILDEFIEHLARLWRDDPSRRAVWHAIQSTPATRATAAATEKEMLEIIAEVMRPLARGAGYEERMSLAGLLVHTVSSLLNYAVRDVNSSEEDFDSIVEEIKRMLISYLFSVATG

SEQ ID NO: 351 - DNA, 565 bp, Corynebacterium glutamicum
  CDS (101)..(565): RXS03208
gtgttttaagaagtgtttttaagagaatacgcattgaagtagttttccctgctggcagcggcataaattgagtttggaaaaacaaggaaggcagcctcctgtgaaggatctggtcgataccaccgaaatgtatctgcgcactatttacgagctggaagaagagggcattgttcctctgcgtgctcgtatcgcagaacgccttgagcagtccggcccaactgtcagccagactgtcgcccgtatggaacgcgacggtcttgtgcacgtcagccccgaccgcagcctcgaaatgactccagagggacgttccctcgccatcgccgtgatgcgtaagcaccgcctagcagaacgcctccttaccgacatcatcggcttggacatccacaaagtccacgacgaagcatgccgctgggagcacgtgatgagtgatgaggttgaacgtcgcctcgttgaagttcttgacgatgtgcatcgctcccctttcggtaacccaattcctggcctcggcgaaatcggtttggatcaagcagatgagcctgattccggcgttcgtgccatcgatctg

SEQ ID NO: 352 - protein, 155 aa, Corynebacterium glutamicum
VKDLVDTTEMYLRTIYELEEEGIVPLRARIAERLEQSGPTVSQTVARMERDGLVHVSPDRSLEMTPEGRSLAIAVMRKHRLAERLLTDIIGLDIHKVHDEACRWEHVMSDEVERRLVEVLDDVHRSPFGNPIPGLGEIGLDQADEPDSGVRAIDL

SEQ ID NO: 353 - DNA, 562 bp, Corynebacterium glutamicum
  CDS (101)..(562): FRXA00307
gtgttttaagaagtgtttttaagagaatacgcattgaagtagttttccctgctggcagcggcataaattgagtttggaaaaacaaggaaggcagcctcctgtgaaggatctggtcgataccaccgaaatgtatctgcgcactatttacgagctggaagaagagggcattgttcctctgcgtgctcgtatcgcagaacgccttgagcagtccggcccaactgtcagccagactgtcgcccgtatggaacgcgacggtcttgtgcacgtcagccccgaccgcagcctcgaaatgactccagagggacgttccctcgccatcgccgtgatgcgtaagcaccgcctagcagaacgcctccttaccgacatcatcggcttggacatccacaaagtccacgacgaagcatgccgctgggagcacgtgatgagtgatgaggttgaacgtcgcctcgttgaagttcttgacgatgtgcatcgctcccctttcggtaacccaattcctggcctcggcgaaatcggtttggatcaagcagatgagcctgattccggcgttcgtgccatcgat

SEQ ID NO: 354 - protein, 154 aa, Corynebacterium glutamicum
VKDLVDTTEMYLRTIYELEEEGIVPLRARIAERLEQSGPTVSQTVARMERDGLVHVSPDRSLEMTPEGRSLAIAVMRKHRLAERLLTDIIGLDIHKVHDEACRWEHVMSDEVERRLVEVLDDVHRSPFGNPIPGLGEIGLDQADEPDSGVRAID

SEQ ID NO: 355 - DNA, 1114 bp, Corynebacterium glutamicum
  CDS (101)..(1084): RXS03219
cgtgtttaaatctagaagtttaaagggtgaaaacagtccattacttaagcaccaatctgccataatttttaccccaacgcataggcttaacggtgtgaatgtgaagttaactgacgccgcccgtgaagctggagtaggttacggtactgcttctcgcgcaatttctggacgaggttccgttgatgcagcaacccgtgacaaagtactcgccgccgccgagaaacttgggtaccgaaccaacgccatggctcgtgcacttagggaaaacaagacccgcaccgttggcctgatcgttcccggcattatcaataagttctacaccgaatccgccactgtcctccaagatgaattagacaaatccggataccaactagttgtttccacaactggaaacgacgcagaaaaggaacgtcgagctatcgaatccatgctcaaccgccaggtagatgcagtggtgcacgctccagttaatccccaagcgaagtttccaaagggcttcaaagtggtcgagcttaatcgtcgtagcgatctcaaccgacctactgtgaccagcgatgatgccactggtttgaaggaacttgctcttcatattttggatcagggataccgagatataggtatcattgtcggtcctgctgagctcagcaccgcccgagaccgcaaagccggattcatcaacgccctcgaaaccgaagccacacaacgcggaatccgcgaagaactacgattccgggtagttcactcccgctactcccccaccggcggttatgaagcattcgcagaattccgcaatgatctccctcaaatcgtggtgcccctgagcacgcaattaactctaggagttctcaaagcaacccaagaaaacggcataaaaatatcggatgacctgtcacttgcttgttacggcgtcgccgaatggctcgcagtgtggggccctggcatcaccgttttcgcaccagacctcccagccatgggcgccgcagctgccacgcaggttttaacgcttctcgacgccgccccactccccgaaaaccacttaagcattccggggcagctcattgtccgtgggacaactccaaaggtttaaaggtagaggcgcacaataatgaaaatt

SEQ ID NO: 356 - protein, 328 aa, Corynebacterium glutamicum
VKLTDAAREAGVGYGTASRAISGRGSVDAATRDKVLAAAEKLGYRTNAMARALRENKTRTVGLIVPGIINKFYTESATVLQDELDKSGYQLVVSTTGNDAEKERRAIESMLNRQVDAVVHAPVNPQAKFPKGFKVVELNRRSDLNRPTVTSDDATGLKELALHILDQGYRDIGIIVGPAELSTARDRKAGFINALETEATQRGIREELRFRVVHSRYSPTGGYEAFAEFRNDLPQIVVPLSTQLTLGVLKATQENGIKISDDLSLACYGVAEWLAVWGPGITVFAPDLPAMGAAAATQVLTLLDAAPLPENHLSIPGQLIVRGTTPKV

SEQ ID NO: 357 - DNA, 1107 bp, Corynebacterium glutamicum
  CDS (101)..(1084): FRXA02763
cgtgtttaaatctagaagtttaaagggtgaaaacagtccattacttaagcaccaatctgccataatttttaccccaacgcataggcttaacggtgtgaatgtgaagttaactgacgccgcccgtgaagctggagtaggttacggtactgcttctcgcgcaatttctggacgaggttccgttgatgcagcaacccgtgacaaagtactcgccgccgccgagaaacttgggtaccgaaccaacgccatggctcgtgcacttagggaaaacaagacccgcaccgttggcctgatcgttcccggcattatcaataagttctacaccgaatccgccactgtcctccaagatgaattagacaaatccggataccaactagttgtttccacaactggaaacgacgcagaaaaggaacgtcgagctatcgaatccatgctcaaccgccaggtagatgcagtggtgcacgctccagttaatccccaagcgaagtttccaaagggcttcaaagtggtcgagcttaatcgtcgtagcgatctcaaccgacctactgtgaccagcgatgatgccactggtttgaaggaacttgctcttcatattttggatcagggataccgagatataggtatcattgtcggtcctgctgagctcagcaccgcccgagaccgcaaagccggattcatcaacgccctcgaaaccgaagccacacaacgcggaatccgcgaagaactacgattccgggtagttcactcccgctactcccccaccggcggttatgaagcattcgcagaattccgcaatgatctccctcaaatcgtggtgcccctgagcacgcaattaactctaggagttctcaaagcaacccaagaaaacggcataaaaatatcggatgacctgtcacttgcttgttacggcgtcgccgaatggctcgcagtgtggggccctggcatcaccgttttcgcaccagacctcccagccatgggcgccgcagctgccacgcaggttttaacgcttctcgacgccgccccactccccgaaaaccacttaagcattccggggcagctcattgtgcgtgggacaactccaaaggtttaaaggtagaggcgcacaataat

SEQ ID NO: 358 - protein, 328 aa, Corynebacterium glutamicum; identical to SEQ ID NO: 356

SEQ ID NO: 359 - DNA, 759 bp, Corynebacterium glutamicum
  CDS (1)..(759): RXS03200
gagaagttgctgccattcgccaaatccacccttgacgcggcggagtctttcctctcccacgccaagggcgccaacggttcgctcactggaccgttgaccgtaggcatcatccccacggcggctccttacattttgccgtcaatgctgtccatcgtggatgaagaatatccagatctggaacctcacatcgtcgaggaccaaaccaagcatcttctcgcgttgctgcgcgacggcgccatcgacgtcgccatgatggccctgccttctgaggcaccaggcatgaaggaaatccccctctacgacgaagactttatcgtcgttacagctagcgatcaccccttcgccggccgccaagacttagaactatccgccttagaagacctcgatctgctgcttctcgacgacggacactgcctccacgaccaaattgtggacctgtgccgccgcggagacatcaaccccattagctccactactgctgtcacccgcgcatccagccttaccaccgtcatgcagctcgtcgtcgccggccttggatccaccttggtcccaatcagcgcaatcccatgggaatgcacccgaccaggactggcaacagccaacttcaactctgatgtcaccgcaaaccgccgcattggattggtgtaccgttcctcttcttctcgcgccgaagagttcgaacagtttgcactcattttgcagcgcgctttccaagaagccgtcgcgcttgctgcctcaactggcatcaccttgaagcaa

SEQ ID NO: 360 - protein, 253 aa, Corynebacterium glutamicum
EKLLPFAKSTLDAAESFLSHAKGANGSLTGPLTVGIIPTAAPYILPSMLSIVDEEYPDLEPHIVEDQTKHLLALLRDGAIDVAMMALPSEAPGMKEIPLYDEDFIVVTASDHPFAGRQDLELSALEDLDLLLLDDGHCLHDQIVDLCRRGDINPISSTTAVTRASSLTTVMQLVVAGLGSTLVPISAIPWECTRPGLATANFNSDVTANRRIGLVYRSSSSRAEEFEQFALILQRAFQEAVALAASTGITLKQ

SEQ ID NO: 361 - DNA, 18 bp, Artificial Sequence
  Description of Arificial sequence: Primer
ggaaacagtatgaccatg

SEQ ID NO: 362 - DNA, 17 bp, Artificial Sequence
  Description of Arificial sequence: Primer
gtaaaacgacggccagt

1. An isolated nucleic acid molecule from Corynebacterium glutamicum encoding a metabolic pathway regulatory protein, or a portion thereof, provided that the nucleic acid molecule does not consist of any of the F-designated genes set forth in Table 1.

2. The isolated nucleic acid molecule of claim 1, Wherein said metabolic pathway regulatory protein is selected from the group consisting of proteins involved in the regulation of metabolism of organic acids, proteinogenic and nonproteinogenic amino acids, purine and pyrimidine bases, nucleosides, nucleotides, lipids, saturated and unsaturated fatty acids, diols, carbohydrates, aromatic compounds, vitamins, cofactors, and enzymes.

3. An isolated Corynebacterium glutamicum nucleic acid molecule selected from the group consisting of those sequences set forth in Appendix A, or a portion thereof, provided that the nucleic acid molecule does not consist of any of the F-designated genes set forth in Table 1.

4. An isolated nucleic acid molecule which encodes a polypeptide sequence selected from the group consisting of those sequences set forth in Appendix B, provided that the nucleic acid molecule does not consist of any of the F-designated genes set forth in Table 1.

5. An isolated nucleic acid molecule which encodes a naturally occurring allelic variant of a polypeptide selected from the group of amino acid sequences consisting of those sequences set forth in Appendix B, provided that the nucleic acid molecule does not consist of any of the F-designated genes set forth in Table 1.

6. An isolated nucleic acid molecule comprising a nucleotide sequence which is at least 50% homologous to a nucleotide sequence selected from the group consisting of those sequences set forth in Appendix A, or a portion thereof, provided that the nucleic acid molecule does not consist of any of the F-designated genes set forth in Table 1.

7. An isolated nucleic acid molecule comprising a fragment of at least 15 nucleotides of a nucleic acid comprising a nucleotide sequence selected from the group consisting of those sequences set forth in Appendix A, provides that the nucleic acid molecule does not consist of any of the F-designated genes set forth in Table 1.

8. An isolated nucleic acid molecule which hybridizes to the nucleic acid molecule of any one of claims 1-7 under stringent conditions.

9. An isolated nucleic acid molecule comprising the nucleic acid molecule of claim 1 or a portion thereof and a nucleotide sequence encoding a heterologous polypeptide.

10. A vector comprising the nucleic acid molecule of claim 1.

11. The vector of claim 10, which is an expression vector.

12. A host cell transfected with the expression vector of claim 11.

13. The host cell of claim 12, wherein said cell is a microorganism.

14. The host cell of claim 13, wherein said cell belongs to the genus Corynebacterium or Brevibacterium.

15. The host cell of claim 12, wherein the expression of said nucleic acid molecule results in the modulation in production of a fine chemical from said cell.

16. The host cell of claim 15, wherein said fine chemical is selected from the group consisting of: organic acids, proteinogenic and nonproteinogenic amino acids, purine and pyrimidine bases, nucleosides, nucleotides, lipids, saturated and unsaturated fatty acids, diols, carbohydrates, aromatic compounds, vitamins, cofactors, polyketides, and enzymes.

17. A method of producing a polypeptide comprising culturing the host cell of claim 12 in an appropriate culture medium to, thereby, produce the polypeptide.

18. An isolated metabolic pathway regulatory polypeptide from Corynebacterium glutamicum, or a portion thereof.

19. The protein of claim 18, wherein said polypeptide is selected from the group of metabolic pathway proteins which participate in the regulation of metabolism of organic acids, proteinogenic and nonproteinogenic amino acids, purine and pyrimidine bases, nucleosides, nucleotides, lipids, saturated and unsaturated fatty acids, diols, carbohydrates, aromatic compounds, vitamins, cofactors, and enzymes.

20. An isolated polypeptide comprising an amino acid sequence selected from the group consisting of those sequences set forth in Appendix B, provided that the amino acid sequence is not encoded by any of the F-designated genes set forth in Table 1.

21. An isolated polypeptide comprising a naturally occurring allelic variant of a polypeptide comprising an amino acid sequence selected from the group consisting of those sequences set forth in Appendix B, or a portion thereof, provided that the amino acid sequence is not encoded by any of the F-designated genes set forth in Table 1.

22. The isolated polypeptide of claim 18, further comprising heterologous amino acid sequences.

23. An isolated polypeptide which is encoded by a nucleic acid molecule comprising a nucleotide sequence which is at least 50% homologous to a nucleic acid selected from the group consisting of those sequences set forth in Appendix A, provided that the nucleic acid molecule does not consist of any of the F-designated nucleic acid molecules set forth in Table 1.

24. An isolated polypeptide comprising an amino acid sequence which is at least 50% homologous to an amino acid sequence selected from the group consisting of those sequences set forth in Appendix B, provided that the amino acid sequence is not encoded by any of the F-designated genes set forth in Table 1.

25. A method for producing a fine chemical, comprising culturing a cell containing a vector of claim 12 such that the fine chemical is produced.

26. The method of claim 25, wherein said method further comprises the step of recovering the fine chemical from said culture.

27. The method of claim 25, wherein said method further comprises the step of transfecting said cell with the vector of claim 11 to result in a cell containing said vector.

28. The method of claim 25, wherein said cell belongs to the genus Corynebacterium or Brevibacterium.

29. The method of claim 25, wherein said cell is selected from the group consisting of: Corynebacterium glutamicum, Corynebacterium herculis, Corynebacteriunm, lilium, Corynebacteriunm acetoacidophilum, Corynebacterium acetoglutamicum, Corynebacterium acetophilum, Corynebacterium ammoniagenes, Corynebacterium fujiokense, Corynebacterium nitrilophilus, Brevibacterium ammoniagenes, Brevibacterium butanicum, Brevibacterium divaricatum, Brevibacterium flavum, Brevibacterium healii, Brevibacterium ketoglutamicum, Brevibacterium ketosoreductum, Brevibacterium lactofermentum, Brevibacterium linens, Brevibacterium paraffinolyticum, and those strains set forth in Table 3.

30. The method of claim 25, wherein expression of the nucleic acid molecule from said vector results in modulation of production of said fine chemical.

31. The method of claim 25, wherein said fine chemical is selected from the group consisting of: organic acids, proteinogenic and nonproteinogenic amino acids, purine and pyrimidine bases, nucleosides, nucleotides, lipids, saturated and unsaturated fatty acids, diols, carbohydrates, aromatic compounds, vitamins, cofactors, polyketides, and enzymes.

32. The method of claim 25, wherein said fine chemical is an amino acid.

33. The method of claim 32, wherein said amino acid is drawn from the group consisting of: lysine, glutamate, glutamine, alanine, aspartate, glycine, serine, threonine, methionine, cysteine, valine, leucine, isoleucine, arginine, proline, histidine, tyrosine, phenylalanine, and tryptophan.

34. A method for producing a fine chemical, comprising culturing a cell whose genomic DNA has been altered by the inclusion of a nucleic acid molecule of any one of claims 1-9.

35. A method for diagnosing the presence or activity of Corynebacterium diphtheriae in a subject, comprising detecting the presence of one or more of the sequences set forth in Appendix A or Appendix B in the subject, provided that the sequences are not or are not encoded by any of the F-designated sequences set forth in Table 1, thereby diagnosing the presence or activity of Corynebacterium diphtheriae in the subject.

36. A host cell comprising a nucleic acid molecule selected from the group consisting of the nucleic acid molecules set forth in Appendix A, wherein the nucleic acid molecule is disrupted.

37. A host cell comprising a nucleic acid molecule selected from the group consisting of the nucleic acid molecules set forth in Appendix A, wherein the nucleic acid molecule comprises one or more nucleic acid modifications from the sequence set forth in Appendix A.

38. A host cell comprising a nucleic acid molecule selected from the group consisting of the nucleic acid molecules set forth in Appendix A, wherein the regulatory region of the nucleic acid molecule is modified relative to the wild-type regulatory region of the molecule.
